United States Patent Application Publication US 2021/0254182 A1 - sequence listing, part 3

SEQ ID NO: 91 - DNA, 7609242 bp, Phytopthora sojae (residues 3,804,623-5,706,933 of 7,609,242)
  misc_feature (40911)..(42413): n is a, c, g, or t
  misc_feature (44154)..(44253): n is a, c, g, or t
  misc_feature (1018625)..(1034984): n is a, c, g, or t
  misc_feature (1036211)..(1039539): n is a, c, g, or t
  misc_feature (1043630)..(1045157): n is a, c, g, or t
  misc_feature (1052050)..(1052243): n is a, c, g, or t
  misc_feature (1057205)..(1060318): n is a, c, g, or t
  misc_feature (1068672)..(1069727): n is a, c, g, or t
  misc_feature (1070516)..(1074243): n is a, c, g, or t
  misc_feature (1086719)..(1089539): n is a, c, g, or t
  misc_feature (1136080)..(1137066): n is a, c, g, or t
  misc_feature (1137866)..(1142586): n is a, c, g, or t
  misc_feature (1207052)..(1207151): n is a, c, g, or t
  misc_feature (1318525)..(1319078): n is a, c, g, or t
  misc_feature (1330827)..(1331903): n is a, c, g, or t
  misc_feature (1337551)..(1343863): n is a, c, g, or t
  misc_feature (1346839)..(1359455): n is a, c, g, or t
  misc_feature (1364269)..(1364817): n is a, c, g, or t
  misc_feature (1369478)..(1369597): n is a, c, g, or t
  misc_feature (1373964)..(1373964): n is a, c, g, or t
  misc_feature (1377891)..(1378181): n is a, c, g, or t
  misc_feature (1381005)..(1381104): n is a, c, g, or t
  misc_feature (1716272)..(1716371): n is a, c, g, or t
  misc_feature (1898378)..(1900994): n is a, c, g, or t
  misc_feature (1902632)..(1903384): n is a, c, g, or t
  misc_feature (1923874)..(1924225): n is a, c, g, or t
  misc_feature (2013417)..(2013516): n is a, c, g, or t
  misc_feature (3074820)..(3074919): n is a, c, g, or t
  misc_feature (3655456)..(3655555): n is a, c, g, or t
  misc_feature (4084570)..(4084669): n is a, c, g, or t
  misc_feature (4283405)..(4283504): n is a, c, g, or t
  misc_feature (4298420)..(4309139): n is a, c, g, or t
  misc_feature (4312980)..(4313133): n is a, c, g, or t
  misc_feature (4329460)..(4329559): n is a, c, g, or t
  misc_feature (4361465)..(4361564): n is a, c, g, or t
  misc_feature (4707429)..(4707528): n is a, c, g, or t
  misc_feature (6047486)..(6047954): n is a, c, g, or t
  misc_feature (6710239)..(6710338): n is a, c, g, or t
  misc_feature (7149083)..(7149182): n is a, c, g, or t
cagtgagccggtcactctgttgattgtcttccgagaatgccgtactgttcgtatccgagtgttcgtcaacgcttatcacttcgggggactttttcttctttttcttggcagcaggctttggggggtgcgattgagcttgcgcctgcttccgatgagatcggatccaagctaattctcgctcttgagcctgaaggtcgtccagcgcaacccgatccatgtcaaagaacgagctggctgccactcgccgcttcttcctcggcgaaggtgatggcgacggtgatgccagtggctgtgcagaagctgctgggggtgggcgggacttcggcttgcgacaggatatagcactagccggggcagacttgcggcactggtatcgaccgagcgcgtctgtctttccgtcgcgactggggtccgttgatacgggaaacagagctgttgcggacttcctcgagggcagcagtctcggcgacgaagtaggcgacagcgcaggtgacgaggtcggtgacgacgaaatcgatgaagatgacgatatcgacagtggggaactcggcgtagcaagcgcaggtttcgatacagaacccccctgtcgcgcatcgtttgtcacaggcttcttgggatgaagtgtcttcttcgtctctccgacatcgggcaacttgcctcgctcttgggcgccaccagccatcttccgccgcatatgcggcagtacacgcttgcgtttgcattcacgcggtgtcgctgcccctctacccgcgaccttcttatcttctcgggacgaaatttgcggccgagttggtactgcatcattcaccgctgctactcgaacagaagcctgggcttgactcttgcccagcacacgatcgttcagcaccagccgcttgtctccagtcttcacaggcaatttcggtgagtcctcaccggacgacgacagggaagaaaacgaaaacgatcgagtccggccgccaatagaggaatccgacaagctggatgacgaagaagacgacgatgacgaagaagaagacaacaggtccacgacctccaccggcttcggttttgcagctggaactcgtgacgtagcccgttctctctgtcgcttctccacgcgaggctgcttactggtatccttgggtcttcgtatcctcttcaatggagccttgccgttgctcttccctgcggctttactgcttggacgtcggatcgcttcaacggcagcagcgcggcggcggcggcggtgctcagagctagagctcaaatccgagtccgaactagagccagagtctaaactcgagctggggctgctggatctggctctagctccccgggacttcttagcaggtcgttggtgcttcaacttttgactgccggacagtcttcgatctttctccacgggctgcggcatcgtctgcctccgctggaccggagcttgcggctggtttgtacttaaagtatgggacttcttagtcttcgtagacagcagcggaggcgcaggcgtgacgcgccgcttcttctccttttccttcttcctcttcttcgccttactaccgggcgtgtgcgtctcgaaggcggccgccatcgccagcgccgcctccaccgcgttcgagtagccaacggactgcgcgggcctccgcggcgtcacgggggacgcagatgcggacgcgggcgccatctcgcagtcgggtgacgcgtcgctgctgtcgctcagcacgatcacctccgccatcgtcgcgtcctccgagagttttgtatgggaacgccgcctaatgatcgcacggctcaaatgattggacgaaaacggcaactatctcgcttactgtgacctgccagatttgtgccacttcaacttccaacggggtgatcaggtccagtcaccatttgcagtagtttggcctcgacgatgaactgtcttaggggcaaccgtgagcattgggtcgtgtctactgtatcgctagcagcgatttctgcggcatttgcggtaagtttggcgcgacgacgccgggaagctcgcgcagcgccgcagtcgttggatcagccgttgcaccaggcaacccaccgggacacgacgcagggagaagaacatgagcaagaccatgttgcgggtgaggagaccgatgattcatctgctgcttctactgcggtggtggagagcatgcacgacgccgttccgtcgagggaacaagtccagctcggagtcaagaaccacgctgtggctctacttgctgatagagttctaggtgtgctctgcagcgctgttatgttttacctcggcacaaagcagcacttgtgcgcggctgtactggtgctcgccatgacgatcgtgttccaactgaaagccaccgagagaactgctgggaataacccggcaccgtcaactggatcgaagctcgaggtgcgttgaaattcccttctcatagatagctattgtcgtgacaatagctgcttcgataatcttacagatactacgaagcctggatcgagatgcactgagcgaactgatgcgcgaggatctgcctcggtgggtcaagttcccggacgtggagaagtgcgagtggcttaatctcgtcgttgccaagatgtggccgtacgtgaaggtggttgtcgcacgatctatgaaagaagcgctagttgcggagctggagctcgttaagccgacagtagggatgacggaggtcggtattcgcagcctcaatttcggaactgctgctcccaaaatcaacgggatcaagtgcttggaggggacgagcgacgagtaagtgacgctggacgtggatctcgtcgtgacgcagaactcggaagtcgtgttggcctttggcaacccactcctgcatgcggctatgaacgtggagatatcggacatcgtgcttcgagggatgctgcgagcggaactcaaacctctgtttccatggtggccaccttttggagcggtggtcgtcagctttatctagagccccactatcgacttccagctgaaaacgctgcacctcaacatcatggacctgccagcactgtcgccaatactacacaaggccatcaactcggccatggagaggcgttgcttgtggcccaacaaagtattgatcccacttgttgacgatctcaacattctggaaatgaacgcgatgactgcgaatcaccctctcggcatactcgcaattcgtgaactgaaggtgagaagtgtatgtccatcaaggacgctctcgtggtggtctgggatcttcagcttccgtgtaaacattagtgtgggcaaggaaagcacaacctcggaaactgttcgcggtcagagctctttcgactttagtgaagaagcgtacaagcttttggtgcttgatcctcaaacccaggatctgagcatatctcttgaaagcagtgaagccctgcagccccgaaagcgcattgataccgcgtgggttcatctggggcacctaaaaccgcgagtcggatgtaatgagcacgtatcgttcgggtgtgacagtgatcgcctagcagagttggagctgttttggtacccgtttactcgacgcgggagttcggttcaggatgtcgacgaagcagcgctccccgacgatgtcactcacgtgggagcgattatcatcaaactgttgcggtgccaaaagactggcttcgatggatattagtggcaccagcgacccgtatgtcgtgttccgcgtgggctgtcgccgccagcagagctcggtcaagcgccacacgctgaatccggtacgttgttgtgtcccttttaattggaattgtgctgaggtactgcatctcattgcgaacgatcctggtgtcttgtatagatttgggacccacccgagtgcgttgagctgctggtgaacgactaccagcatgccgagctgtcggtcgtgatcatggacagcgacctgctaaagaccgaggacactatcggccgcatccaaattgctttggagcccgtgcgacgcgcgcttcagtattcgggcacttggctactcgaaggcaactgcgactccgtcacgctcgagatggagtggcgtggcttctaggcttatccatggcaacaagacgcctgcaaggcacgttgcagtgcaactgcttgcatgtcagttcgagagatacggtcgaatttggcgaataaaagcgactcacttcaccagtatgagcccatcgcctcgttccacttgattaatatatgcatccgcactaggtacgattcgccaactgctctctccttcgatcaagtctcacttgtcaatagaccaccaagaccgcgaccgcttcacttcctccacgtcggcgacgctgctgcagccatgaactcgctgctgttcctgtacctgaacctgatccgcgggccgcagatcgtggccgctcgccgcgagaaggaggagaaggagaagcgcgcgcagctggaggcggacatcgcgagcggcaaagtgtccaagatggcgagctgcaagaagtgcgacgcgcccgtggaccgcctggcgatgcccatcggcgtgacgcccacgtgcgccgcgtgtctggccaaggaggcggaagagctgcgcgtggccaagatgcagatgcggcgggagatcaagatgtcgccattcctgtggttccaggtgttcatcatgctgctcggcctcaccgtcttcttccaccgcaacgtcatgccgctgttttagttccttcgggtgttgagaaggtgaaagcgatgcccaagcagccgcgatgatcgattatatagaaagctttatacactacgcgtggattttatgactgtcgtcatggagaactcgcttgttgattgacattagcgtgcgcatatgcgcagcaacagtgctgatgaaatgcaacagcgatattccacacggtaacgaaggctcagcgagtacttcggtgttcttattggggcgccaacgcctcgttagcgagaacaagcataccaaactgatgagacggccaaaggtgtcgcatgatttatgggatttcgattctgaagcccaccacacgttgctatagatatggcaagcaacaccctatcctgcacgacatccataggttctaagcttaaatgttaacactgccgcgtcgacacagtcatgacgaaggtgtcaggatgcgggtgagatctcgattgaacacgacggcctgatcatgctgacgtcttaacggtcgtgtacgtgaagtcaatcgtgtgcataacaatactcccttcctcactaaagcaaagtaggcactcgtcgctattgcctccgcaccacatttggtagaagttttaccgtgaaaagcaccatggcacgttgccattggcaactatgatgtcaccccaaaaccggcgagccctcctcctaattaaactgagcgatggccatcacaagtagctcaccccaagatcccaagtctggagcatggatgttgctcatcacgaggccagccaagcgtttacacccttgccatcgtgggctagcgagcgccttgctcaaagtatcggcaactgcagcgtcgtggcttgggtttacacttgcattttgtgtagggtcttctattaggagctacaacagaatcgctcatttgagcatgagtggcagcggggacgaagacatggcgcccgacgccggcggagacgccactttgggcggcaagaggccacgccttgcggacggcgagggtgcgctgctgcctctgtcaatgtgaaaatttgtgagcatggcgtgggtgcaaggctaacggagtgaatgcggcagacctggggtcgcagcagagcattctcaagtcgatgcgccatgtgcctggtccgttgcaggacgtcatgaagaagcgcgcagatcagtgagtttcacaggtggcgtgtgtatagattgcatgttgacgggtggtgactggcaggctggacaactcgcagggagaccacagtcggatcgccagcgccaactcggatcggtactcagtggcaatcgcgacggtgtttgatcaaggcccatgggtggaaatgtgtcagtatctgggcatgccagctgtatcggggacgctttacggtgagcaaatgggccaagtgcacccgccgctgtaaatgagagtcgtgacgcagcggcttggttgattgcaggcagtatcaagatccgcaacttgaagtgcacggtgcagaacattgtggaagatgatgaagcgctggccaaggtcccgcaggtaaaacaatacgcagtgctgcctgggggttgttttcgatgctccttaccgagcactgtcatttgtttgagcagctcttagctctcatcaagtcggtgcgctacgttgacgaagagatcgtagctgttctacatgtaagcgaccgctagttatgatgcccggattgtagagaaatcgcagccacttattagcacgtattttctgcaggatccgacgggagaagtcgaaggctactttcaccgcgaacttgtggagcaacttgggccagcgctcgttgctggagtgggtgttctgctgtacaaggtgtcagtgttcactcccactgatgcacccgtgtcaggtaggcgaaagagctatttgaacatcacgccccgaaatgtccgacggatattcgtaacaaacgagcaattgagcacctcgctcgacgagaacccagtcgatgtgttcaacaaagagaaggaggtagaatctcagcaagagagcgacaatgacgattacgacgacgaccaagcgtccaggagcgagcaggcagcccgtcagctgctgcaacacagcacagtgcgcgacacttcagccgaattgactttcctctcgcagcgccaagtgattcatcgcaatcctcctgtgcgagtagatcccgctgcagcacctaccaccaagaagaaaggcaagcgcggaaaaggtactgcagccagcaagagccaaagtgaagaaagcggtctggggaaatggcagtggagcaagttactcaagaagacgacggacggcagcgacgacgagtcagctgaagattcgagtcgttcacaacaacgccaggggtttctggacgccagctcgcgcctcatgagcttaattaccaagcagaactcgaaaagcaggtatgatatagtatgagcaatgtaccgaaaaccacgtgtgcttactattgttgctttattttacgtagacattcatcctcagaagaccgctcgaacgaccaagactcgtcacctgctccagcaaagcaaaagaagcctaccgtgcgattcgcaccagggactgctttcgatccaccgcgttctccccgtaactcggacaaccgcgatgtgactgaacttacgcaaataagcccgcctacacagtcatccaacactcaatcatatacacctgtggctggaggtagcgtagctaaccagtcagaagaagaagaagacgatgatgactggtagccgtatttgatgggttaggactgagtcaatacctgtctacacgtattactaagtactgaagtactgtactatgttccgcgagtttaaaccgtcattcaaacatttcccctgccgaactaacgttaatcatggaaaatctgccgttgccgctcctgcagcatatcttaggattcgcggttccctactattgccaagatgtcgcgtcagacaagcgctctacggcgatttcaacattgaaagagctgaagctggtagcgaaaagctggctgcttcctgttcgcactatttctcagcgatttgagctctcagcactcactttcacggtgaaggcattgcccaaccaaggcaaagtacagcaattatactctgaagcggaacagcgaggcgctcaagtgactgaattgcagattaaaatcgaaaggatctttgacaacaagagctcaagccaatcgacgttgcacaagggcgcggaagcactcggaatcgactggtcgaggatctttgcgtgctttccggaactaaagctgctcaacctggatgaaataccactggacactcgccatatacttccgatactcgacgcgtctgcaaggcattgcctgaaattgagctctttgacactcccttatgccgagaaagaagccgacgagtgccatattgaagcagtgatgattaagttgtatgaatcactcaaatggtggcgggtgcatggcactattggcgggctgcgacgtctaaaagttcctagtcggaattgcgaccagccattccgtgcgagtgaggagtttattgacaatgtggtgaccaattgcccgctggttgaggttcttgacggctataaggagtcccttttcactaccagctgcttggtatgtgaggatacgtggcttttgacgttgcaggactgggagaagttcaacaagacgtgtaccaacttgcaagaatttcactgggttattgttccctttggagacccgtacttccgtgtctttggagagcatactaagccccagctaagaaaattgtcgttcggtataggaatgttctgggagtggcaatggtactttcacgacaagagtgaggctgctggtccaattcctgacaagaactgggatcaacgagattactgtgagcggccaggatatggctaccttgccacggacgtaagcgctgtactcaagggctgcccattgctggacacactagaagtcctactgtatcaccctttcgacccagacgtggagatcgatgttgagcggaacgaatcgcgcgacgacttcccggatcgagaggtgatcaacgcgaacgtgtttgacgacagcttttgcgaggcagtggccacacactgtccttttgtctccagatttgaaattgctgaggtcgctgaacggctcaactctaagaatctgaggccaatccagacattcaccgatcgggggcttatggcgcttactcagctcaagtatctggaatccctggacctgcgcagtgttgcttgcactggcaagggtttgttcgacttcctgaatggtctgtccgcgggttttagcgggaatcgctctttcgacatctgtatcggagccgatgacttggcgtattacgaggagttgaaaagcttgctgcttcatattgcgctggcttcggatccccctctcacccggcgaaaattcgtgctcgtgctcggaaactgcagctattattccgatcattgcgttggctggcggtggagcgtgacgtatctccgtgagttaaacgatgttatggctcgtgtgaaagccgcccacccatcgctgcgtcagcaccttgtcgctatgcagtacgacggatactccttcaagcgaattgctgagtttgggctctattcggtgcatgccgaccctgcaatctacgacgagtgggagggttgggaagatgaaaagaacaacgacggcattacaaccaccaaccgtgagctctcgcacgatgatacaaaccaagacgaagacgaggacgatgacgaagagatggaagactacgacatggatggctatggatttatcgactacgatgacgatgcatccatgtacggcggctatagcgacagtgatagcgattatggcggctttgtatgctcctgctgcgactgagagcctggttcgtttgatttctaacagtccacaagttgccttttgttccacttcaacttgcctttatgtgccccactctaatttaacgtgcaccacacttccagcacccggtgaatcaatttgggttcaaaaagagaccatgacgaccatgaaggagtatcgctgggaggaggacgaggtgtcggggccgctgctgcgtcaactgctgaccgccgaggattattcctcatgggagacgcgtgcattcctgcgtccaatcttccgctggatgaaggtcggtctgcgcaaggacggcagtcgcgaggacgcggccgtcgagaaggcgttcgcattcgtggagtggctggtgctgctggccacgcagggcgacagcacgcgcggcatcccgcagctgccgatgcttcagcctagctacgcgctcaacacaatcgtcacggccagtcagcgagctggcagcgtgcgggaggcccagcgcgcctttgacctgctggaggtgcacggctaccagccagacgtgttcacgtacacggcgctaatcgacgtcattgcgcggaacggagacttgcccgctgctattcaagtaattagtatatggtactggtgtcgagggcattggtggtgggggctgatggggttgtacttgtacttgttgtgaattaggcatacgaggagatgcggcagtcgacgtccaagccgaacgtcgtgacctacacgacgctggttcgagcagtggggctgagtgacaaagttggggcggagcagtgcttggtgttcctcgatcatgcacgggatgatggggcttttgacgaggctttgtttctggaagctctggagacgtgtgcacggaggaaagagcgcgcggtggcgacccgcgtgctgaatgagattgcagctcattcgccgaagctccgcgcggacgatcggttcttttacacggtgggccaggttgccaagttgttggactacgacggtttggagcccgtgcttgctgagtggctcgagagcggcgtgctgaaccaagacgagcgagaccgagttgagaagctgcaggcggaagaggggaagtcgaccgcggacggtgggtacaatggtttcaactagcgattggttatatttcgaggttctattgtatctgacacggcttgcgcggtacaggctcgaaaacgctgggctgtctggggcaccagacgtctcaatctgttcgaaaggcggttgttcatcatgacattaaccgcctgatctctcgcattcagagcggttcgctggtgactgtgtgagttcatcctcgactcattgagctcatcaacgcactcttgctaacgcttgtcggtttgaccctaccagaaatgactttgagacactcattcaccagtgcaggaagcggaaatggaaggaagacgtttccgtcattattgatgctatgcgtgaactcgcgaccaagggttggcagccttcaggcgatggcgacgacagcgaaggcgagcccatccctccccagccacagcttcagctcacatcgaagacgtacgtttccatcgtcgatgcatacatgtgctgcggtgacgagcctcttgcatggcaagtagtccaagaaattgacgctttgccggatatcactcgagagctgccgttataccgcaagtttgttcggggcgcatacttgctcacgaattgcgatcatatcgccgagctaattgccctggcgcgtgaagacaaggttgtattcacgcagcgaatgggtgtcgagatcgcacgtatgtttggataccgccacaaggaggggttcgagctcctagtgcacgaacttcctcttggtgagactggcgtgcaagcgagaaaacaaggatttctggaagaattggtgaagtcttgtgcctacaagaacaactcggttggggcagaggaaacgctgcaggctatgctgaagcacggcttctgtcgttctgctgccaccgaaacagcgcttttcatgtgctgtattcagcatgacacggtttcggaggcccaagcgatgctgcagcacttccaagaatcacctttgatgatgccggtgccagtctacgactcgctgctgcgtgaattctacttcaaatacacgcggcgtgggaacgcattcgatgaatcgtcacgcaaagtcgcaatgaagacgctttatgctcggcgggcaatcttcgagcaagtgttcaaggatcacaaggctctggaggctgaaggaactttcgcagttacagctagagaagaccaagattctgcgagcttcaggtattggtgttcaagagcgaatttatcctgctccccattgatgttttcgcagcacgcaatgcaagttctgacgactagtcgagacaaggactccaagaacgcagccgaacagtccattcgggacgcgctcttgatcacccccgatccctgcctctttttactgcagtcggtcgtctcgctacgcttcctcgacttgacgtttagaacactgggcaagttggcgaagcagttgcttgtggtggtgacagacgagctcccgatggaggaacgacatgcggagtactgcgtgagccagctgccactgctgtcagttcacattgtgaaagagctggacgacatcgtgtacttgcatcggtcgcaccgatcggaactgctggcgttctgcctcgatgcacttgagacggatagcgttgacaagaccatgggtttcttgatgcgccgcccggagctgtacgatgcggagacagcgtcgtaccttggaccaaagttcgctgagatgttcgtatatggcggggtcagcaacgtgctcatgttcttcaagtcggacatggatgactcgctggaaatgcgccggcaattcgttcgagaagtgatcgaggtagagaacgctgctgccgaggaagatgaggacgaggagggctcgtccagtttcaggaacacgtacaaggcaatcagggagttcaagctagagcacgaggcggagttcatgccgtacatgatgcaggcccgcgcagcaatgccaaagcccgtgtacgcggacgcgtcggccacccccgctgacgatactgcgtatttgaagatccccctggctcaagatcgtatcatagtggttgacaacgacgaggctctgtccgcggcgacggagctactgatgcgcgacagcgtgactcgactgggcctcgacgccgagtggcgccccgatagccgagcagcggtgccgtccaagtgctccatcttgcaggtcgcttgcgacgactacgtgttcatttttgacttcgtggagatggcgctgggcgacttggaggagctgttcgagcacttgttcgcttccgagaggatcgctaagatcgggttcgccatcgatggcgacatcaagcgactgcggtggtcgttcccagacgtcaagtgcttcgacacgttcgtcaacgtgcttgacttttccttcgagacgctggaggcgacgacgcacctgtcggacggatcggtcgtcgcgaccaaaagtaccagcaacgatgctgctgcgtcgtcgtcgtcgtcgtcggaaaggctgcagcgccgcaagcgtagacagaaggggctcagtacctacatcaagcaggcactcgggtatccgctgtcgaagctgcagcagaagagcgactgggagcgccggcctctgacgccgcagcaggtcgcgtacgctgcgctggacgcgtactgcttgctgatgctgcaagacgccgtcgccaacaagtagagactgttgtagatcatagcaatgtacaaaccgacattggttgccgttgaagctgctgacgtcagcgatgacgcttcgtaccaccgttttggtaccgaccgtgtttttacccaatcacgaggcggcgcagtgacgcccaggcagcgactgcttgactcatgtttgactacctggtagactttccgcccgggtgcgactctcgctaatcatcttcagggccagcacatctggtcgagccacccgcaggcagacacccagggacctcgcaggagacctcgccccccttcgttcgctcgatgtcgtcgcccgccacgcccgcgcaggtcctgcaggacgtgcgcttcgaggagcgtctcgccgaggtggaggcgcggctgccggccacgctggcgctggcgcagagcgggtcgctggccaggcgcaaccaggcgcggcgcaagctctaccgcgacagcgagctcatccgcgtcgagctggaggagcgcatgaacgcgctgggcatcgaggcccagtggctctcggcgcccgagatgcaggcggccaacgccaagctggacgtcgtgcgcaagcagctcaagctggacgtgctgccggccagcgcctcgccgctcgagaagctctacatggtggtgcgcatgctcacgatggcgctggtgctcgtgggctggctcagctgcgtgacgctgctcatcccgctcaagtggctcaacccgttcctcacgcgcatgggcgtcaagaagaactacctgcccatggacatcgtctcgtggggcacggccgccatggtgtgcgtcacggcctgcaccgacatgaaggtggagggcacggagaacctgctcaacctgaaggactcggtggtctgcatgttcaggtgcgtgagaatagggggatttggagaggatgtttgggtgaggtgggggggctgatgatttttttgctcttgtcgtgcagccactcgtcgaacctggacggattcattgtcaacggatcgtcgcctgtggccttcaagtttgcagctaagaagagcatcttcctggtgccgttcctgggctggtcggcgcgctggggctttgacttcgtggccattgatcgttcgcaccggtatgtttggctgcgtgtgcaccttttggcgatgatcgtaagatctaatcgttttgaatgtgcaatctaccatagatcgtcggcattgaagagcttgaaggagctggccgtgtcggtgaacgaacatggcaactcggtctgcatctcgcctgaaggcacgcgctccaaggacggactggtaagtgatggtgatgctagtctctcactgctcttacttgcagagaagtctaatggggaggttgttgctgtgcgttctacagctgcaggagttcaagaaggggcccttctacctgcgcgaggacacgaagaagaacgtcgtgccctccattgtgttcggcgcctacgagctgtggcctcctggacgcctgttcagcatccccggccacgtacgttgagcgccgtcacccaagctgcaatacaacgcttgctcatactcatcactaacctcatgcgctgaattactttgctcttgcagacgctggtgcgttacctgcccgagtacaagtcggacccgaacctgaaccgcaaccagaaccgattggcgctgcgccgcatctacctcaaggccttcacggaggacgtaccggactacatcggcactcgcgtgagcaccaacttcatcgtgaagaacatcttctaccactacctcgcctgggcgatcacgtacaaggtcacgtcgtgggcgttcgcggtcatcagcttcgtctgctacgcgctcaacatcacttacggcaccttcatgctgttctcgctggtcatgatggttgcgggcgaagccctcatgttcttcacctgctaagccagcccgggacgatgccaagcgctgtctgtcctctcgacgaactcccgacaagagacgcaaaactaccctctctgctaccgttgtgcatcacccaccaccgactagcagcatccagcaccagcgctgcacgtccaagcaagccgccgaccgctgctggcgtcctgaatagcacgagcttcgtcttctcgtctaccgtagctgctcgcgtcgtcccacaatgcacacacacctttcaatacatttggtagttaggtagtaagaagctctctgctgtcttctcctcctcctacttggcagcagccgtggctgtggttgtggctgtagctgctgctggctgcggcttcttgagcctcttgttcctggcctccaccagcttccgtccgcgctcttccagcgtcgcgtgcagcggctccgcgggcgactgcaccgacgaataggacgccaggcggtggcggtccaccttgagctgctcctcggccgatagcgtgggcgtcgacggccccgcgggcttccccgcgcgctccgccgccgcctcctgccgctccctcttgcgcttgcgcacgccagcgttccggaaccgcacgggcgccgtgcgcggctccccccagcccgtgagcacgttgccctcgagcagcgtgtcgcgcaggaacttctcctcgaactcgtagagcttgcagccctgctccacccagtcgcgctcctcgtcctgcgccttggcccgcagcgcccgcagctgcgcgtccaagtccttggccgacaccatttccgcccaagaaatattggaatgtgttgaggatgcaaataaaaaacaattattgaaaaatgattcaaagcctaatttctgtagccatctcggtgggagggagtactgtatgaactttcatcgacaagcgattgctccgatgacgatgacgatgacgatttcagaggctgcagtggctacgacagctacgattacaccccctcgcgcgcccaccgctttgacgacgatgacgatgacagcgacagccccttcgacagccaaaagtacctggggttcaagtcgggggactggtgtgaaagaatccctattgcagcttgcgcgatcaaacattgtaatgccttcgtacagatcctcaccccaatcctcccatttggcgtagatatcgggatcggcgagcccgaactcggcaatgcgcatgaacgagttaccggtgcgatccatcgtgacgacatgctgccgcagagacgggtgggctgctttcacacgcatcatgagccgctccagctcacgcagaaacgatgcgccgtagtccggagtcactgcatagcgtgagctgtagctgcagttctcaaggcgaagaacgaactttcgttcggcgcacgggaggtcggaggcttctgcgattttcaacagcagctccgtcaccacgtcatagaacttcaaccgcgacgcggttgccggtaaactcactcgacagcgagttcagaaacccaaatattccttcgcctgaataattcacactgcgtagatccagagactgcaaaaacttgagttgtgaaagtgccaggagtcccgtatccgtgaatgtctcgattggcttgatgtcttcagtgttatactcttcagcgacctccacaatagcaaaactggatagaaagggacaacatgaagcgagcgcctcgcaaaacggatcaccgaaaatctctgcattgagcatctcgtgaaacgacaactcttggcccggtgcccctgaccaattcagcggtaccccctcatctgaaataaacggtaggtctccttgcttattactgctgtagattgcagaccacacaagacgccgacgccagcgctgcaggtgtactgcgtaaccagtcggtatcctctagccgctcaggtgagctggatcccacgcagaaaggcagcgaagattctccgccggagaatcgcgcagtattcgatggttctcgatggcaccgccgccactgcgaacgagcttaagctcgagtaaaagcgcgagaaagcccagaaagggattaattcggagtaatcatcaaccaaatagacgaattaaaagtatgatgacaatcggctacagccgaggtaactccagcaagctaccggtaagtgtaatgagtagtctctgtagcttacaattctaacgtttcctcgtgcgcaaaagcgccggcctcaggctcgctcaggtgtgaggtctcccagatgagccctttcacctgagcgccgagggggctaatgacctgtaaaaaaaactatttttctcaattggcgaagaggaagaggtcacctcttaagaggtgcagtttcgaactcacaagtcgaaaaggatctttggggtacgaatatctttccggttgaaaaatccggactctggttgtccgttttagcgaagcaatggaccaaagtcgttagcattgcttgagccattcgtaagaagcaacttgacaagtcgggtaacttgttgtcgtctattactcgaattgcggctatttgtgtaaaaccttactctaggtgccggcgaattttaaatgactcgcatcaccgccgagatttacttgagattaagccgcaacggttggtgctcgagcacagttcccagatcttcgcgtgaaacgcctaccagagtgcgctaccgagctagaacgaggacttcgatctccataggaagtactgccgctgggcagtaggtcatagcggtggaccaagtccgagcggcacgaaaagcaccatgttgaagtccagacttgcaatcgccagctggtacagaacggcaatgttctggtggtccaccgcagtcaccttcgatgcgatcggcaattccttcgcgtgcaagttcatcgcggtatccttcgccacgcagtcaaactcaaagagcagcgctagcagcaacaactttgctactagtgctgcatcagttaaatggggcaatggcggtgacatttacctgggccagggcttcgcatccacgttgaagtttcctccgtgccgagagtggtcgttcgtaatcagctcgcctgaaattgctgacatcctggcccagcaatgaccgcgcagccgcattatgctgcgtccccgccagccatgacaaaaatgcttgcgttgtaatcagttctttccatggttttcattttgggtccgttgggttcgcgcgactactaccagccaatcaaaacacgcgaagcttaaaatgggccgaccaaatttaccagtccaacgtaaattggggatgggatgcgatgttgaagttgttctcaacgggcgcccccagtggagtgccgagccccccccccccctcccagcttttctttcgctcagtttgcaatttgcctactcctgcgcaagtgcccctcgaccagatccagcgaacccccagaatccaagccaagccgcgatgtccaagacctcctccgttgacgccggtgagcccgccgtcgccgctgctgttgtcgtcgtcgtcgtcttcccttgccgtgactaactgccgcttgttgccgtgccttgcagagtcgccgaccaagtccgagtgcctggagctgttccgcgcgctgaagaacaaggacgagctgtcgcgctcgtgcaaggagatcatgcagatgatcacggccaacgacaagggcgtgatggagagcgagccgctcaacacgtacggtggcgcccgcacccgcaatggcatcagccacgccgcgctgcagcgccgcttcacgggcaagatgtcgggcgtcagcctctcgggataagcgggggcgagaccccccgaatccagtcgagtcgagcccagccccactcgttgcgtagcctccatcaccagtcatatgtagtcaggaggagaaccatgtagaggggacaacctagccaggggcggccggtgtcgtgtatgatcccctcacgaagtctctaaacccccacaaacttcaatatgaaaacaccaatgacccattttcggatgctgtgtcgtgcccattgtatataacccagtgatacgtttgggtgaaattctggcccaattcaatcatccacgagtgggtgatttggattgccactcaatactgccgataatggagctgctgttgcgtcgcgcggcgtcgtcggcgtcggcgctgccgcagggccgcctcctcgtggccacctaccgctccaagcgcagccaggccaagcgcgaggcgttccgcgtggccagcggcctgcccgtcaacgacaagaagaagaacaaggagcagcgccgctcgcagcgcaagccccagcgccatgagcccgcgccgcgcgtggaggagccgccgcgcccgacgctggaggagatcgaccgggaatgggccaagatgcggctgcgcaccatggtcgtcccgccggcggtgatgccggcgcgcacgcgcaaggagatcgagaacaagcgccgcatgcggcgtctgggcctgctgcccgacgaggacgaagaggagggcgacgggacgggcgcctcggacccgcgcaacacgggctacgtggggaagcgcgaggcgccgtccaacccgctgcacttctacgacggccgacagtcgcgagcggagaagcaagccgaggccgagagatacagaaccacgggccggctgccggcgaggcggccggtgtccatgaaggataagcagttcaccaacatcacgccggcgcccgacaatgtggtggagcgcgagtttatgatcccggacgagccgcccaaccccaaggcgctagaccttgcggtcatcggtcgcccgaacgcaggcaagtcctccatcatgaaccggctgctcaatgtgacggtgtcggcagtgtcgccgaagtacaacacgaccagagaccgcattctgggcatctacacggagggcgatgcgcagctatcgttctacgacacccctggtctgatcaagccgaaggagacgcacgagtacgtgcagaccttggtgaccactgcagccgagacgctgcagggtgtggacctgtcgctgctggttgtagactcggtcaagcgtctcgatgacgccgccctgcaggcgctggagaaggtgctgacgacctcggcccaggtgtgctcacccacgatgctcgtgatgaacaagtttgacctggtgggcaagcgcgagaagatcaacctggactacaaggtcaaggagctgtcccagatgatcgaggagatctacggcaagcactacgacgccgagggagcgtcgttgaatatcgacccgctggcttacatcggcgataactgcgtcaaggtgtcggccatgaagggctacggcatggacaacctgaagaagaccctgctgtcgctggccgtggatcgaccgtggagctaccactcgtccatgcactcggacatgtccgacttggacctggtggcggagatcatccgcgagaagctcttccgccggttcaacaaggagctgccgtacacgtttgagcaggagaacgtcggctggaccaagttcaaggacaagagcatccgcatcgaccaggacattttcgtacgtgttgccagtcgtgcattggacgttacagtggttcattactctaacttctactgtgttcttctctttgctataggttcctgctgcccgtgtccgcaagatggtggtcggacacaacggcgacacgattcgctccgtgggtatggcggcccgggacgagatcgagcaattgctcaagcgcaaggtgcacttgtacctgaacgtccgcgtccgttagatgcaccttcgcttggtagatattacgtagtagagctctcattgcacgtagatcagcttagaaatcaacgcacttcattcaaacgttaaaaacgtcacgcaaccacctctataaatgactcctggttcgctcggtctaatacgctgtttcagttaaagaattgatcagataaagaaatggctacacttctaatggctacattttcatatgtacggtgcacagtacaagggctttctttacctggtacccctccagcatttttgtactcttgttttgtttcgtcttcacacagacagaactaacggtaggcgcagtattgtctgttcctactccttcttctcattggtattagcagaatcgcatcccctcaggttgtacgtgagtttcaatacagtgaggttatgggaatatttgttgtcccgatatcctgccaccatgcctgcagttttatcttttgcttggtatctactgcatagcccctagttgtctcgacatcataatattttagtttttcgtaatatatatatatgtaggctgcgctgattgtaaaatactgtggctagcttatttatcagtatttagttactgcaaactctttgttccaacttagcatcccaaataaaatttctctcttcgctcgatttgttgtggcgggagtagtggtagcaatggcatacgtgggaggaggcaggcaagtgattgagaaaaaaatatatgagtttggatctattactacggcgtccatttagagggttgaggcgccaataatggcgaccatttagagattatactgaaaacgttggacagatgatggataacagatggatagtcgttggacggcaagtccaacgatttcgaatatcgagttgagtctatttgagcctgttcgctcaatagagccgaaaacgtttggaccgcgtacacaataatgtgtggcagatgtaggttcgcgggcagcattgaaaagcgggataaagcaagacactgaagctagagaagcaggcactggtgaaccatggcacgccgtcacccaaggatcatcacggcgctgggtttcgtaaatggacgctgagcgccgtagctttgtgctgggtgccgtgacttggcgcatgtaaggatcgcatcgtgccggtggctaagcgcaggtgcagaaggcccgccaactcacatgcttggctggaagggtgcagtcaatgcctagaagacgcactgtgagccgagaagagcgcgatcttcacacaacacgagcacgagattttgccgctgtcgtagtcaaagagccagcacagcaagacagacctgagtatcaagaagcacgtggatttcgccattggaagagcaaccaagagcagaaccatggtgtttaaactaatccgaacgactaacatgtattgacttgcattaatgatctatctctgtgacctgttgtggcggcgcagaagattaacgacggtagaccattgtagctgctctttacgacgagtgtaatttcgccgggtttgatctccaatcggcaaaatgtccattgctccaaccagcatgtgccttgcctgctgaagcgacggattacaagtgtaagtattattttgccgggcaatgctctcgattttcagcattacgaagctaaaatctgacaatcgctttcgtgtgtttttgtttggcaggtccattggcacaagcgatcgatacggcggccagtttttgcttgggcatccaaaccaccaaagctcccacgccgcactcaacggaacccttgggaatgtgaagccgactatcgcacgatgctgccaccagtttgaagaccggttcaccgaggaagttagctcacaatcaacttcagcgacacgttcgtcggcatcaagctctgcttgcgtttcttgaacagcagagtggctgctgctacttccccccccccccttcactaatgttatttgcgctatttgatgccactgtcgaaattgctgtctgctgttgaacaacttgcacaattgaggcggagtttgcgtgaatggtgcgcatcatttgcgttatcccggtggagtccagcgctgcggcaacggcttcagccaccataacgttaacagctccacgcgaagccggcaaagtacctgatcccgaagtactcatactttcgtgcatgacgtccgggacgaacgtatcaatcttgctatccacgctagatatctgatcgtgcaactgggaaatattgttatccacattgtcaagtctacggttcatgttcacaataactccgagatgaggtggtacaccgctagctctgacggcatcacccggacgccagcatcgacacaccactttaggtttcaaagccagcaccagttcaggactatgaaacagcggcgagttaaacagaatgtgactctcatctagtgttcgtactaagtggtcatggtggtagaccaacgaagccaaaaggtagctgcagaccttctgcaaattatcagggacattcggaaataccacgctaacagcgctccacacggtcgcatctacaacctcgaagaacggggctagaattgagaactctggcgtttcatacggcaaaccagatacaaagcgaccgaccacacaatcaccagcggcctcgtatcgaatatacgtgtcctgtactccaggtaaattccagccacctcttaaagacacggaagctgatgatggtccacctgtacaacagcctgacacgtaagtcgacgaaccctttcttgcggagtgtgacccaaaatctgcaggttcacttccagtaatttcgagctcacgtgccaccaagggtatttccattgactttttcaagattctgctgtagcgatcatactgattcttcccactaaataggaccgccttagcattgaatccgaaaactgtaaaatacatcgcgagcgagagaatcgggcagatatccggctccgtcggattcgcgtacacgtggcgagggtcacgctgcctttcaccctcttgatcgtttttcatgtggcaaaaccaaattgccagagcatcttcgtcccattcaagatggccatatcgaattgacgaagaagtgccagctcgacacatcaaattccacgagaccaccagaaatgaatgagcaaaaacaaatctcttcttgggttgctcacgcatcaccttacaaactttttgatacagcgaaaacgtacagcgaaaacgtaaaacccactttgccttctgctagcgattcgccctcatcctgctgtcgctgaactacccagcgcttcaaacctttaaaaaaggtcttcagttcaccgtcgaactcgcccggcattttcacgttataagtgcggtacagatgaaacaaactagatctcatcgagctgtacaccgacttgcctggcttcttcccgtctttcttccgcagcgacaacaaaaagcactcgaagtgctcgggggtgatctgcagtaactccactggaggtcgactcaagtcttcttgcataaatctcttgacgcggcacgacttttccgtcagcactagagactcgtccatgcctataaccccatccaacagggcacggagcggagctgcaaccaattccggttctttgctgtgaagccacaatacgagctttacgatgccatacgagtacacttctctcgacttcttgcacacaacgttgccatttatctcttcgacttcttcgatgagttcctccatcctggaaagcctagtcactaagtacggcccaacaccactaagttcgtttccattgactgtccagcaaattcgtactacatatgaataacgaggtttttgatcagttatagaacacctatagtgaaatccatataatcccgtttgcagtcgaggaatcctaaccagatagggaacacatagtcagttagaggggttcatttagggaggtgccactgtagtgaataaaaccaagagtcgttttaacgcatgagtgatggctcgaaaagatgcggcctttcctttcacttctagaaaagcgcgatggagttcaagcacgagggcaacgcgctgttcgtggacgaggcgtacgaggaagcggcgcgctgctactcgcgcgcgctggagacgcagccgcaggacgcggacgcgctgtccaagcgcgcggcggccttcctgaagctgcacaagctgcgcgaggccgcggccgacgcgtcgcgagccacggaactggacgcgacgctgcacatggcgcacctgcgtcacgggtgggtgtctgcagccatttgggacggttaaagaacagcgaagtgacgcttgtatgggtggctgcagagtggcgcagttcgagctggagaagtacgcggaggccaagcgggcgttccagcgtggcaaggaggcggcgcccaagggcaatgaggcgctgctcaagcgcttccagacgtggatccgcaagtgcgacgcagagctggacagtacgtagcaatagtagagaggcgttgcgatattgtggggcttcgttattgagaggattgttggttgtgtcattggaattctaggcgatggagaggctgagctcgtgattccggatgacccggctccagtaaaggccttgacgccgaacaaccagagcgctgctgtagttgcaccgttgccggtgaagccgacgatccggtgagagttggttgagatggtttgtgtgcgtattggtgattgcagctgacctggcgttgtggttcctacctacagccatgactggtaccagtcaggtactcacgtgacggtctcgattttgcagaagaagctggcacaagaagatgtggaggtcactatggagccgaagaagcttcttgtgcgtgtgaagcttgacggtgaggtcgtggaggccttcaatgaggctctcttcgacgaaatcgtgcctgccgagagctcgtacaaggtcctgggcacgaaggtggagctgaagctgaagaagaatagcaacggcatgcactgggacaagctcgaggaggtggtgtaccagaccggtacgcaggttgtgacgggtcctgcggccgtatttgaagcgaagcccgagagcgtgccgcgcccgtacgcgagcgcccgcgactggaatcagatagagcgggcgatcggcgaggagctggaggccgagaaacccgaaggcgaggaggccatgcagaagctcttccgcgatatttatgccaaggccgacgagaacacgcgcaaggccatgaacaagtccttcgtacgtggctgcaggcaactggtatgaatgattgcagaggtgaactaatcttcctctatttattctgcttttatgacttccccagcaaacttccggcggcacggtattgtccaccaactggaaagaggtggccgacaaggactacgagaaggagcgaacggcgcccaatggaatggagtggaagaagtggggctaaaactcttcggcggcttcgacctgctgcaccacgtcacagatttcatcactccaacaattatcattccccggacgtgattcgtccataaaccacaacattccaaacataacccaatcacaagtctccatcctaaccacaactttcgcgcatacaaattcaaagttttgaaacaccagcgcacgaaggagcagtcaggcaggcagcgatggcatcgccgcgtccaccggcactgccggcgagcgacgcgtccagcagcagcgtcaccgacagcggcaccgacgactccacgccgcccaactctccgcagccgcagcgctctccgtctcctccgttcgccgccacgcgcgggcccgcggctgcccgcgcgccgcctgcagcgccatcgtccgtgtcctctgcgtcgacgccgtcacctccgccgaatctaccggcacgccggccgtccgtggcccccgtgggacggcaggccgccatccacgcgacccccacagctcccagacgcaagcgcaaggccacgccgccgcgtcggcgccccagcagccccgcgagcgccacgcagaccgtcaagaagcggaggaaaccgggcgaggccgcgctgcgggagatccgcctgctgcagcgctccaccaagctgctgctgcgcaaactgccgtttgcgcgcgtggtgcgcgagatccagaccgagttcacaggcgtcggctatcgctggcaggcggaggcgctgctggcgctgcaggaagccgccgagacgtacctcgtgcgcaccttcgaagacgcgtacgtgggtggttgagtgaactgggtgaagagaggggattgctgacgtgttgattggttcattgtacgtgtaggaacttgtgtgcgatccacggcaagcgcgtgacgctgcaggtgaaggacattcagctgtcgctgcggatccgcggtattcgaccgacggcctcgtaaggagacgaagggggaggcaggggcttttttgcttttttattttgctaaatgcagcgtgaccagacagcagtggtgtcaatccgtggtgctgtatgcgacttgtgatttatccgtgtctgtcggtggggttgtttacgtaacgttagctgcttgtgagtccaagagttatgaagaggtacccgtcgtttgttcggtgttgatctcttttagtggctctcttgtcgctgcggccccgaatgtgcgtccataatggcaatcgagctgctgcaggactagctgttgaaggcatactgtttcagcgtttgctgaaagtctggctgatgttagcgacgtctactatttgcccaacttggaccaagtgcaaaaacttcagttcgcgtggtttaaaacgtgaggttacggagaagttgctagaattgctggtggcacacttgagggtgatcctggccactcttcggatcctttgaagcggttctgaagccgttgaagagaggcgcgaggcttcaatggctttgagaaggtcggtcgcccaagaattcgtttggcgaggccttgtcctatcacagccatcgttcccaagcactgattacacgcaagacaacatcaaatgagcacgaccactgccatctcccacatacaacagcacagaaacttaccagagcatgcccactgcgctgcggacaatagtactcacaagatgcctgtccagacttgcatctgccaatagcacagattcaatcagattgagcaattggaaccagttcaatgcaaccaacttgagacttactctcgtgaaacaaatagctgcttggtcgttttcttccactcagcaacaatggctcttgcatctttcccgtttggtatgggtcctagtttaatcgccacctcgtattcactttccggatcaatgaactggtagtcctggaacagctcctgtgcacaataatttggaagaagacagccatataagacaaccaagcattagccgtagcacctttaatgccaatgcaacgaaacatacctgctcgctgctcatttgatcttcgtatttgttgcccggttcgcgctcccaaattctcttgactgcaaggtacggaggtagccgagataggccacctcctgtcaggtatgccttcacagtcgcggctacttttccatcgtatttgcgatctgaagagcattcaaggtagagcatcagtcacggagaagtacctcagtagctgccaacaaacagtaggtcctgcgtactgacttaccaaggcggatttctcgggtctgcgagttgtactcgatcgcaatatactctgctgaccctatcaaaaggcgatcttcaagcgggaagtacttggacacatcctccgatgagatcgctacgtcgctttctggtgttagcgcaagagttccggggaaagcgtgcgccgatgccttgaagagcactgcgtaataccacatctgacgcgtcttggcaacacacgtcgtttggtcggcgtagtatagcgcggtacgagggtccttcgcgagtgatgaggaggacgaggatatcgacagctttcgtcgtgggggcaccatcagagcaccgtcacagttgtcgcttggttctcccataaccacatccccatccttcgaaggcgctcgaggcgatgccgtgtcctccacttcgccatctatttccccttcagcaggatccgccatctctaccttgaggcactgaattagtttcgacagcaccccaaaccaagttgggccaaagagcgcgtgattggttagtccaggcgagacaagcgagagcccgtatccatatgcctccagtttgaggtcgttgatgaaatcttgatcccagaagagcgtgctcgcaaaaatcgtgtcaagccggaccacttggcaggcaggcaggacctcgaacagcataggcactcgttcttgaaggacttggtcgaatgcaatgttggcctcctccggggctagaagcacacgaaacaagcagggttaatgtctaagccacacagaagctttaacaacaaaaggaccttctagcagtgcgttcaccaatgccgtagtctgacgagtaaacgcattggagtagcgttctagaacgaatcgagatagccttttcaagaacagagctgatgccatcgctttctgggaacaaccgccatagttagattcccacaagtagccgcgcagctaaactcgaggatacttacagagagaggaatggacgccgacccagagcgagcgtctatagcaaaaaataccaaacaagcacacaaaaatcagcaccaacctgataattcacgcctccgaaccaatccatccatacttcgaattgctgcattttccgcctccaccagcgtctgcacgacctcctccggcggcctagacagcgtgcgcaccagcgacagcgccgtaagccccgatctatcctgagccgctgggtcagctcctcgttccagcagcgcttgaaccgcctgcccagcacccagcaaccgtcagcacactaccactccgatcaactgcaacaaagccaccacctctcctcacctcctggaatccccccatagctgccacatgcagcggcgtctgcccaaactatcagcaccataaaacaacagcagaccatacaaaatcagcaccattaaacccaccctaccacctcatacctcaccccactactgcagcgctaagcttaccacgtcccggacgttcgggtcgaagcccactctgtccaccagcaagtgcaccagcttgaccttgaccttctccctggccatggacacccccaccgccacatgcagcagcgtggctccggcctcattgcgcacgttgcgcaggtccagccgccagtgcctgagcccgtcgcgcgtggggatggagcccgagtccaggtacgtccttagctccgagaccttgcccaggttggcctggtcgaacagcgagtgcaggacgccgttggacacgcccttggccgccgcgtactgcgccgcctggcggaaggccacgtcctcgtcctcgcggcgctccacggtggccagcagctgcgtctggaggtgcgcgacctgcagctgcagcagcttcacgtccgggctggaggcggcggcagtggggatcgcgttagtagaggaggtgggcgacaggatctggcggcacgagatctccaggtgctgcagacgctgctgcgcctcgtccatcatggccagcagcgagcgatcgggcgccgcgctcgagagctccgccatgcttacactgctgcaggatggatacgctttagatgtcgctgattggatgagaggaggttgggtaccttataagtggtagtagtgacagtggcacgtatccgtaagtaatctattagtcaagacgaagattgaggggtgtggagttgataacccttcattcctgaatctgctgcctgcttggagagaggatgaagctgtcactgatctgtgtggttcttggggagaatggaagcacgttcgatgtggagatcaacgacggtgagagggggatgcagttgcaacaggtggtcaaggacgagaacgaatgcgactacaaggagctggatgtgaagaaccttcacctcttctcggcaaagaaaacggacggcacgtggttagattgggcaggagcgaatgttgtgacgctcgatactatcgagtcgatagacagggaaacccggtaggcttcgagctgctggaccccacactgccgctcaagaacgcaaggaatttcggagagaactttagaccgaaggatggtcaagttcacgtgctggtgaaagtttactggtcaaacaaacgacgacgcttgggggatttctcttcgtatgatacggttgaacagctcgaggacgtgcctcagattgacattgagggtgtaaactacgtcacgttgccgggtccttttttggagaaatgtggcttgcgaacgagctgatgatcttatgccgtcctcaagtgcacgaactatggggattcctccgagatgaagtgatcgcgaaagggaagagggggttcgtcgtgggacctcctggcacgggtaaatctgtgggtgtgttgagttttgcggcttcgttggatcgcgaggaatgggacgtggtttggatccatttgagtggtgctgcgaggaagcctatctgcgtggatttggaggccaagctgtggtgggagatttccgaccgcaacgcattcgagttccccgtgtcgacaacaagaaactgtttgtctggatggatgggctcaaggatacacctgaagatgatgatttttttgcggatatttttcagatctcagagcggaagacaaatttgtgacttgtgcctcgttggctacagttcggaagacaaacgaggaggacgactttgttaacaagatcaagtattttacgctgcactcatggacgaagcaggaatacgtcgaagccattgccgatccagacttttacgacacggttgctgccaagtttgacgcaacgagcacctgtgacgtgaacgaagcagacgacgacagcgatggagagttgagcgaagccgaaaagaagtaccgtgcgttgggtctgaagttctactatgcgggcggttcgtgtcggtttatgtttcaatatcgcacgcaagtggcgattcaaacgctgacagctacggtggatcgaaccctgatcaaggacaagctgttcacctactgctcatgcgcctatgaagatagtccgattaacaaactctatgggtcgcaagctgccaaacacaaaaggtatggagagcggtttcctgtgagctccttcgcggcgtcgctcctagcggaagaaacgagcgaagatgtgattccgcttttggccattagtgtcaatacgagggcgaatcctggccgcctgtttgagtggttgttctttgcatcaatctccaagcaccaggtgaggttgttctttgcatcaatctccaagcaccaggtgaggttgttcgactacgcaggcgttgaagataaactccctcaagcgcgagtggtgctgttcgatccgaagaagcgtttcaagcgattcaacacgatggggctgcgttcgagcacactttcggatcggatcggttgtggggaaggcgaggaggtgaaggcacagcaaaaattaagaattgcaggtgatcagctttggctgcggcctgtcgtgtgggaccaagggtgctatgacgccgtgtacttcgacacagaagagggaaaagtgatcttcgtccgagtggcccacttgaccaagcaagatgtcaagatgagttatatcaacgaagtgctgaccaaactgaaattggcaggaatggaaatctccacggtggaaatcttccttttgccacgccagatagatacggcgaagttcttggtcgcaaagctcaagtactaaacgatgtcgacgcgtgtggggtctgctcaaaagaaattcacgtgaaagtgcgtgcttttgaggatgctccagtctccacatattatcggtgattttgggttttgtggcgcacacactggcaattcagttatgcttgagcaagcgatgcaatggcgcgcgtagttcatctcctcgcagcctactgggcattggttgccatcgagctccagagctgccgcgcctgccgtatccagccacttgccgtctcttttcgccaggaaaagccgaacctcgtgcgattcgcacttgaccgtctctgggtacttcttttggatcaggtccttcatacagcacacgaacgggtacttcttcgtgttgacagacaggaaaaagatggtgcttggcccaccaatgaacttacaacagagcagaagcatcttcacatgccaggcttttggcaaaatgagtgagaagtcaagaaatgatgccttcaactcagtatctatcactctccttcagaatttgcaacggtccaaggtcgctctcaggaaagggatcatgagtgtcctaagcgttaaacagcgtataaacttagtcatcagtttcatcagaagtcggggtggccccctctagttcatacgactacaagccggcgaggaaatgcaaggacgcgagatcacgagggtcgcaaacgctaagcgctggtttacatacagcccgcgcaacgccatcttggacttttgccttggtcattcgagctcttgttcatggggtgagcccgacgccagtttgctgaagttcgtgcgcgagttgtcggaactcaaaatcggcgagatctcgacgcggtgggacgacagctgccagtcggaaaaccgcctgcccatcgatctccagcacgccaagatccgcgtgggcgacgtcttcgactactacaccacgagcgagggcgtgttggagatccccaagtggaaaagttcccactttgccgggatggaatatccggaaaacgacccacgtattaaattccacccggacagagttcgtgaattcgtcgagcaacacggagttgaccacttggaggagatgcaccaaacaaaatagggtcaactcggggttcatctgcacagatcgtagcaattaaccaaccaagcacttgatcgagtatactcggttttcacgatacttactgttacttcatgactggtctcttgagccattacagcagctcagtatggtctggactcggcacccgtcctggctcccggaagctggcggaagctctcgagttatcactcgtcgggacctgcgcgtagcccctctgtcctctctgctgctgctgctccacgttgccaaagagggaccgtacgaagtcgtagaggatgctcaaggggaagcacacgacgttcttggccctctgcagccactcgtgggggagccacgtcaaataattccccgccgccgccgtctgcagcgcccccttctgcgtgccgaagagctgcacgaccgagcccggccagacgtccccgcgctggagcactttgccccgatggatgagccgcgcgtgctccaagttgaagagcgcggccagcacctgcgccgggtcgtccacggcccagatggacacgttgagcgcgtagacggcgttgcagaagcgcacgaaggccggcttgggggacgcctcggcgtcgccgtcctggggcagcagctgcgtcacccgcttgacctgcgcgtggcagccagggcagcggttcttggtggccggcaggcggcgacacaggcacgagaggcagaactcgtgcgagcagtcggtcaggcagcgcgccgtcgggtcctcgggcagcggctggtcgcacacgaggcacggcagcaggtcgcccatgctggtcagctacgataacggaggcaaatggatatggttagtgttaaagcagtatattgttgtaagagtctcagtattcggtggatcttgaagcgacgtgtggcattattgagattgttgcagagatggtggcgccgcccgaaggatcgagggcgctgcagctgaacccgaaggccaagcccacgacgaccaagatgaagcaggtgatcgggcaggtgctggcggagaagctggacaacgccagctaccagtcggatcgggcggcggcgctgaccaaggagatcgcggacgccgtcaagatgcggctgaaaggtgggggctacgtgcttgggtgggtatgttgtagtgctgggtatttaattgttggctgttgtcgctgtgtgttgacagagtgcaatttccctcgcttcaagtacgtggtgcaagtcgtcattggcgagcagcgcggagagggcgtgaggtgaggattgtttgttaggcgcacaggtctctggtgccaggtatagtgatgatgcgttgtgttgctgtatagaatggggtgtcggtgcttctgggatgccgagacggactgctacgcgtccgaaaccttttcaaacgtgagtgcatgcgtccgcagcagccgatggtcgatagattttttttccctctaactcgcgttctgctatcttgcaaattgtgtattgcaggacagtttgttctgcgtgactacagcttacagcgtttacctctactagctgcagttcgcctgtccttctaatgcacattgcatattgccaaccccagttaacgtgtcacgtgtttgactaccgtcctgaacagcgagtggaaggcctccgtgatgctcacgccagtgcacgcagacgtctcaaagtactcgaaccccttggacagagcgtaagccttggcctcgtcttccgagacgacacgcggacggtcgactttgttcccacacaggatgcaggggaacttacccgcgccgaacttggcagcctcacgcagccaactgtcgagcgcctcgaagctccgtcgtgaagacacgtcgaacatgaggatccctccctgggtatccttgtagaactcgttccgcacctccagatactccggcagccccgacaggtcccagaagttgacgcgcacctcagctccgttgaccatcacgggcttgacgccgtagtcgatgccgatggtcgagatgtacttgctcacgaacttctcctcgcagtagcgcttgatcacgcagctcttgcccacgccactctcccccatcgagatgatcttgactcgcagtgcactgggtcgactgctgtcctggttgtcgtcgttgttgcccaagctcaaagagctgccgccaaatagccccgtcagcttgtctccgctcatgcgtcgcctcgacattcctctgctcttggtgcttcgctccgctatctataatgattcgcctcgtcgcctttgaaggagtttcacgcgtcagtagaatacggaagcaaaacaatcttttattttataaacttactcatcgacgcacatcaaagctaagtcttgttttcacataacgcagcatgggccggttggtttgtcttggttgtcgggctgctggccagtcgatgtctgggacgatctcgcttcagagttgaactcaaagttgcggcggaggtatccacgcagaagtcgctgctccttggtcagcaacttgaccgagtcgtcgacgatctgcttcgcagcaagggtatcagagccctcaccattcgcctgctgagccatcaggtgttcgtacgcaacctggacgcggaacgcacactttgacacgcgaagagcggcgacataagcagacgaccccttgagcgaatgagtttcccgacgagcagtaacgaaatcattgcgctcgtgagcttcgaccacccgcgacgtaattgcctctgaggtagtcgcaaacttctccaagagagtcatgaagagctcctcgtgacctccacactgttccacgcccagcgagtaattgactgggtctccttcaggaatctcgatgctcatgggatcgattgagtgagaaacggcggcctcgccctctccatgttgagcagtagccacgacaggaggctcatcttcaaccgagcttccagtttccatacgctcaagcaacgaaggcattgcgctgccaccactgctgctgagccctccgcggctaggatgagttgaccctagctcctcatggaagctgaccttcttcttcggcaccaagccggaccaggactgcagtcgtccttccggcagatccttcttgttgaacggtgggtggctccagagtgtcgggtttgttggcaacgacgagcgctgtccagaggaggctgggatcgtcactccagcgaacggggctttgatgtagggcaacgtagctgaagtctcggacgttgtgttctctggctcgggtgggctggcagttgatgcgccgctcgtgttccttgataaccggagcaaatctggcaagtcgtttgagctcgtttgtcgcgcgacattgttgtttacggaggggcccagactgaagatcgatgtcgtcggtgtggcagttcgagtagctcggccactttgtagcccaattgacatgggatcgtccagctccagattcgagatggcctgcgctagatccagttgctgcatgtggcgagatgcaggtgcaaggcgagcagtcgatgccgcgtccatcagtgtcacgtcctcaagatcattttcgaacgaaggcatcggcgttggagcaccaggcggcgccatcgcaatccgcaccgggctcttcacggttggctttgatccattctgccttgctgcagccacgtgcccaactgaaccgggtatctgtgcgagagctgcgttctgctggccgaggtagcgaatacgcatccactgtcgaatagccttacggaggctcagctttgagatgggtttcaccataaactcgtccatgccgcagtccagacacttctgccggtcaccactcatcgcgtacgcggttaatccaagaatcgggatacgcggaagattgaactcacgctcaaactcgcggattgtcgcggtcgctgtgtagccatccatgatcggcatctcgcaatccatgaagatcaggtcgaactcggcgtggttttcgctgtaagccttgacagcatcacgaccgttgacctcccactggagcatgtggtcatcttgctgaaggaagcacttgacaacttcccagttgaactcgttgtcctcgacgaccagaatgcgcgcctgggtcgggatctccacgcgtacggatgcagtctcgctgttgtctccagtgcgggttgatccgtcggataacatgggcaagggcggatcaaagaagtcctcgttcgtgtagtacgcgtgtttggggtcgacctcatcgatcaatcgcacaaccaccgtaaagaagaagttgctaccaactcccagctcactgtcaacgtcgatagatccatccatgagctccgcaagctgcttgcaaattgcaagacccagaccggagccagtagggttgttttggcgagttcgctccaatttcgtaaacaaggagaagaggcgcatcttctcctcggcatccataccgattccagtgtcgataacttggaacaggagctttctgaattgtggcggcaagtctggagaattcaccacgctgcatgcgaccgtaatagagccttcattggtgaacttgattgcgtttgatagcaggttcaacagaacttgacgtagacgtacaacatcaccaattacagccttcggcacattatcaccgctctttagctcaagcttgagtccacgctcccgggccttgaacttgaaaatctcaatcgaatagtccaatagttcatgcatctggaagggagcagccgaaatttcaagatgcccagcctcgatcttcgacaagtccagaatgtcattgatcagattgagcaggagcgagcctgatacatacgccatgtgcacgtatctctcgattgacttgtcgaggggctgctccttcaacagctccaacattccaagcacgccgttcaacggcgttctcaactcgtggctgaatgaggccaagaagttcaccttagcagcctccatgtgcttcctcgcagtgtaatcttgtccaacaccaatcacaccacgaatgtttccatgcatatccttcttacttgaagcattcacaagtagcagcaggaacacgccacgcttcgtcgtcatgggaagctccatctcgccaacgtcaataccaatcaacgcctggttcagcaactgccgcacttgctgcctagactctggcgtgatgaacgtatgcaccagcgataggccgagtacgctcgacttgtggtagccagtgatctcctcgattttctggttccactcgttgatacggccattcgtatcgataccaaaaatcggggcattcgcagtatcaatcaatcggaagtactcatgctcctgggcgatgcgatccgtaatatcttgaccaatgccgacaacaccgacgatgttaccgtttaagtcgtatcggggcgttgcatttagcaaaatctcgattctcgtgccaggacgggtaatcaatgggaattcaaagttcgcggtctcaactcccgtaagggctagcgagagcacttcagccacaatcggtcggaactccggagaaatgaaggtttccaccagattctcgcccataacttcctcaatcgagtagttggtaatctgtgccgcctttcggttccagatattgacacacatattggcatcaacgccaaaaatgggagcatttgccgtgtcgatcaaacggctgtactcctgttcctgagcaatgcgctccgtaatatcctgaccaataccaaccataccctttacttcaccgtgctcattgtatcggggcgtggcgttcaacagaatctccacgcgacgtccagccttcgtgatcaacgggaattcaaagttcgcggtctccacaccctcgaaagccttctcaagcacactgcgcacaggcaccttgtactcttccgagatgaactccgccaccaaatccttgccgagcacatcctcgttcgtgtactgcatgatatcggcggccttacggttccaaatgttcacatggccattgatgtcaacaccgaaaatcggagcattcgccgtatcgatcaggcgcgtgtactcctgctcttgagcaatacgttctgtaatatcctggccgataccgaccatacccatgacctcaccatgttcgttatagcgcggcgtggcattgagcaaaatctccacgcgccgaccggccttcgtaatcaacgggaactcgaagtttgccgtctccacatccttgaacgccttctccagaacactgcgaacggggaccttgtattccttggagataaactcagcgaccagatccttgccgagaacatcctctgtggtgtactgcatgatctcagcagcctttcggttccagatattcacacggccattgatatcgacgccaaagatcggagcgttagccgtatcgataagacgcgtgtactcctgctcctgcgcaatgcgctccgtgatgtcctggccgatgcccacaacaccaataacctcaccaatctcattgaatcgagacgtagcgttcagcagaatctccacgcggcggccagtcttcgtaatcagtgggaactcgaagttcgccgtctccgtgccctcgcccgccttcgagaaaacgagacgaacggcctcacggtagtcttccgtgatgaacttctccaccagattctcgcccatcacgtcattcggtgtgtactgcgtgatttcagcagccttcttgttccagatattcacacagccgttcgtgtccacgccaaagatcggtgcgttcgcagagtcgatcagtctcgtgtattcttgctcctgagcaatacggtcggtgatatcctggccgataccaacgacaccaacgatccgtccgtgctgatcaaagcgggccgttgcgttcagcaggatgttcactctacgaccagtttttgtttcgagcgccaattcgaagctagcagtttcgtttccttgtagtgctttgcacatgatatcgtatgtcatcgacttgaactctggggcgataatggtttcaacgttctcacccacaacctcttctaccggaaagttcgtggtctgttgcgctttccgattgaagatattgattcgcatgttagcatccacaccaaagattggagcattcgccgtatcaatcaaacggctgtactcctgctcctgagcgatgcgttcagtgatatcctggccgatacccaccatgcccatgacctcaccacgttcattgtagcgcggtgtagcattcagcaaaatctctacgcgacgaccggccttggtgatcaatgggaactcgaaattcgccgtctctacgccttcgaacgccttctccagcacactacgcacaggcaccttgtactcgttcgaaatgaactccgccaccaaatccttgccaaacacatcttcagtggtgtactgcatagtatcggcagccttcctattccaaatgttcacacgaccgttgatatcaacgccgaagattggagcattagctgtgtcaatcaaccggctgtactcttgttcctgagcgatgcgctccgtgatatcctggccgataccgaccatacccatgacctcaccacgttcattgtatcgcggtgtagcgttcaacaaaatctcaacacgtctgccagccttcgtgatcaacgggaattcgaaattcgcggtctccacaccctcgaaagccttctccaacacgctacgcacaggcaccttatactcgttggatatgaactcggcaacgaggtccttaccaagcacgtcttcgttggtgtactgcatgataccagccgcctttcggttccaaatatttacgcggccgttgatgtctactccgaaaattggagcgttggccgtatcgatcaaacggctgtactcctgttcctgagcaatgcgctccgtaatatcctgaccaataccaaccataccctttacttcaccgtgctcattgtatcggggcgtggcgttcaacagaatctccacgcgacgtccagccttcgtgatcaacgggaattcaaagttcgcggtctccacaccctcgaaagccttctcaagcacactgcgcacaggcaccttgtactcttccgagatgaactccgccaccaaatccttgccgagcacatcctcgttcgtgtactgcatgatatcggcggccttacggttccaaatgttcacatggccattgatgtcaacgccgaaaatcggagcattcgccgtatcaatcaagcggctgtactcctgctcttgagcaatacgttctgtaatatcctggccgatacccaccatgcccatgacctcgccacgctcgttgtatcgaggagtggcattcagtagaatttccacgcgacgacctgccttcgtgatgagcgggaactcaaaattggccgtctcaacgccttcgaatgccttctccaacacgcttcgcacaggcaccttgtattcgttcgaaatgaactcagcgaccagatccttgcccagcacatcctcgttggtgtattgcatgatgtccgctgccttgcggttccaaatgttcacatggccattgatgtcaacaccgaaaatcggagcattcgccgtatcgatcaggcgcgtgtactcctgctcttgagcaatacgttctgtaatatcctggccgataccgaccatacccatgacctcaccatgttcgttatagcgcggcgtggcattgagcaaaatctccacgcgccgaccggccttcgtaatcaacgggaactcgaagtttgccgtctccacatccttgaacgccttctccagaacactgcgaacggggaccttgtattccttggagataaactcagcgaccagatccttgccgagaacatcctctgtggtgtactgcatgatctcagcagcctttcggttccagatattcacacggccattgatatcgacgccaaagatcggagcgttagccgtatcgataagacgcgtgtactcctgctcctgcgcaatgcgctccgtgatgtcctggccgatgcccacaacaccaataacctcaccaatctcattgaatcgagacgtagcgttcagcagaatctccacgcggcggccagtcttcgtaatcagtgggaactcgaagttcgccgtctccgtgccctcgcccgccttcgagaaaacgagacgaacggcctcacggtagtcttccgtgatgaacttctccaccagattctcgcccatcacgtcattcggtgtgtactgcgtgatttcagcagccttcttgttccagatattcacacagccgttcgtgtccacgccaaagatcggtgcgttcgcagaatcgatcagtctcgtgtattcttgctcctgagcaatacggtcggtgatatcctggccaataccgaccattcccatcacctcaccacgttcgttgtagcggggtgtggcattcaatagaatttcgacacgtcgaccagctcttgtgatgagagggaactcgaaattcgccgtctcaacgccttcgaaagccttctccagaacactacgcacaggcaccttgtactcctctgagataaactcggcaaccaagtccttgcccaatacgtcttcgttggtgtactgcatgatatctgctgctttgcggttccaaatgttcacacgaccgttgatatcaacgccgaagattggagcattagctgtgtcaatcaaacggctatattcttgttcctgcgcgatacgctccgtgatatcctgaccaatacccaccatacccttaacttccccgtgctcgttgtatcgcggtgtagcgttcaacaaaatctcaacacgtctgccagccttcgtgatcaacgggaattcgaaattcgcggtctccacaccctcgaaagccttctccaacacgctacgcacaggcaccttatactcgttggatatgaactcggcaacgaggtccttaccaagcacgtcttcgttggtgtactgcatgataccagccgcctttcggttccaaatatttacgcggccgttgatgtctactccgaaaattggagcgttggccgtatcgatcaaacggctgtactcctgttcctgagcaatgcgctccgtaatatcctgaccaataccaaccataccctttacttcaccgtgctcattgtatcggggcgtggcgttcaacagaatctccacgcgacgtccagccttcgtgatcaacgggaattcaaagttcgcggtctccacaccctcgaaagccttctcaagcacactgcgcacaggcaccttgtactcttccgagatgaactccgccaccaaatccttgccgagcacatcctcgttcgtgtactgcatgatatcggcggccttacggttccaaatgttcacatggccattgatgtcaacgccgaaaatcggagcattcgccgtatcaatcaagcggctgtactcctgctcttgagcaatacgttctgtaatatcctggccgataccgaccatacccatgacctcaccatgttcgttatagcgcggcgtggcattgagcaaaatctccacgcgccgaccggccttcgtgatgagcgggaactcaaaattggccgtctcaacgccttcgaatgccttctccaacacgcttcgcacaggcaccttgtactcgttcgaaatgaactcagcgaccagatccttgcccagcacatcctcgttggtgtattgcatgatgtccgctgccttgcggttccaaatgttcacgtgcccgttaatgtcaacgccgaaaatcggggcattagccgtatcgatcattcgactgtgttcttgctcttgggcgatacgctccgtgatatcttggccgatgcccaccatgcccatgacttgaccctgttcattgtatcgaggggttgcatttagcaagatttctacacgacgaccagccttcgtaatcaacgggaactcgaaattcgccgtctccacaccctcgaaagccttctccagaacactacgcacgggcaccttgtattccttggagatgaactcagcgaccagatccttgccgaggacatcttcagtggtgtactgcataatatgcgccgcttttcggttccaaatattcactcgaccattgatatcgacaccaaagatcggagcgtttgccgtatcgatcagacgcatgtactcctgctcttgggcgattcgattcgtaatatcctgcccaataccaaccatgccgatcactgcaccatgctcgttataccgaggcgtagcgttcagcaagatttcgacacgtcggcccgccttcgtaatcagcgggaactcaaagttggctgtttcgacaccattcagcgcctcagacagcacatagctaacagcctcctggtagtccttcgtgatgtacttctccacgagcttctcacccatcactgcatccgtcgtgtactgcatgatctccgcagccttcttgttccaaatgttcacgcggccttcggaatcaacgccgaaaatgggggcgttggcagtatcaatcaggcggatgtactcctgctcctgggcaattcgttccgtgatgtcttggccgattcccgttgctccaaatatctggcctaactcgtcataccgtggtgtagcattgagtagaatctcaactctccgccctgtcttggtaattagagggaagtcgaagttaccggtcggttctccatttaacgctttctgcaaatttgacatcacttcttcccggtagtcttctgcaacgaaccggttcacgaggtcttgccccatgacttcttctgacgagaactgcgtaatctccgccaccttcagattccaaatgttcaccaggccatcctggtctacaccgaaaattggagcgttggcagtgtggatcatccggttcttttccttctcttgtgccatccgtactgtgatatcttgaccgatacccaccatacccatgacttgaccctgctcgttataccggggagtcgcattcagcaaaatctctacgcgacgaccggccttggtgatcaatgggaactcgaaattcgccgtctctacatcttcgaacgccttctccagcacactacgcacgggcaccttgtactcctccgagatgaactcagcaaccaagtccttgccgagaacatcctctgtggtgtactgcatcgtgtcggcagccttcctgttccaaatgttgacacgaccattgatgtcgacaccaaagatcggagcgttggccgtatcaatcagacgcatgtactcctgctcttgcgcgatacgatccgtaatatcctgtccgataccaaccatgccaattactgcaccatgctcgttataccgaggcgtagcgttcaacaaaatctcaacgcgtcgaccagcctttgtgatcagcgggaactcaaagttggctgtttcgacaccattcagcgcctcagacagcacatagctaacagcctcctggtagtccttcgtgatgtatttctccacgagcttctcgcccatcactgcatccgtcgtgtactgcatgatctccgcagccttcttgttccaaatgttcacgcggccttcggagtcaacgccgaaaatgggggcgttggcagtatcaatcaggcggatgtactcctgctcctgggcaattcgttccgtgatgtcttggccaatccccatcacaccaaaaatttggcctagctcatcgtaccgcggggtcgcattcagtagaatctcaactctccgccctgtcttggtaattagagggaagtcgaaattgccagtttgctctccttggagggccttccgcagcaacagacctactgattcacgatgatcttcagcgacaaatcggtttacgagatctcttcccatcacttcctcagacgaaaattgggtgatctctgccaccttcatattccaaatgttcaccaggccatcctggtctacaccgaagatcggagcatttgccgagtggatcagccggttggtttccttctcttgagccattcgaactgtgatatcctgcccaatacctacgacaccaatgacggtgcctttttcgttgtagcgcggtgtggcgttcaacagaatctctaggcggcggccatccttcgtaatcagcgggaactcaaaatttgcagtttcttgcccttttagcgcttgggaaaataccgtccagacggcctcctggaaatcgtccgggatgaagttttcgaccaaatttactccaagcacttcttcattcgggtactgtgtcgtctcagcagctttgcggttccagatattcacacagccatttccatcgacaccaaagattggtgcattagctgtgtcgatgaggcgagtgtactcctgctcttgagcacgtctatctgtgatatcctgaccgattccgacagccccgctaatattgccaaagtgatcgtactttggcgtcgcattcagcagaatatccaatcggcgcccatttttcgtgatcaatgggaagtcaaagtttgctgtgccctctccctccattgccttggagagaactttgcccacggcatcacgataatcctcggagatgaacttgaagatcttctggcctattgtgtcttcattcgtgtagtcggtgattgctgctgcctttttgttccagataatcacttcaaagttgcagtcgacgccgaagatgggggcgttagcggtgtcgatcagccggctgtactccttctcctggatgatacgatccgttatatcctgaccgatgcccacgacgcccactagctggcctgtgtgatcataccgcggcgtagcgttcagcaaaatctccactttccttcccgtcttggtgaccaacgggaactcaaagttggccgtctcgattccctgaaacgcgctctggaagactgcagccacctcggaccggaaatccttggcgatcagcgtctccaccaggtccacgcccatcacttcctcaggcgcatactcgctaatctgtgctgctttcgtgttgaaaatgaccactcggccctgggtatccacgccgaagatgggcgcgttggccgtctcgatgagcttcctgtactccatctccttcgtatttctctcggtaacatcctgtccaatagccacgacgcccattacagacccgagcgtgtcgaacctcggggtcaagcacaacacgatctccactctggatcctctggctgtcaccagcggcagctcaaagtctgcgcctgcgatgcccgagagcgcctggtcgatcttctccgacacgatcttcctgaagttgcggtccaccacaggcagcagcggctcgcccaccatgtccacactagcatatcccgtcatggacgcggtcttggagttccagaccgtgatgttcccttccttgtccagctcaatgatgggcgcgttggcctgcatcatgaccgtagcgtactgcttctcctggatggcccactccgtcacgtcctggcccacgccgtagacgcccacgcacgcgccgtcttcagccagcaggggcgtcatgttggtcagcacctcggcgttgcggcccgtggtcgtgagcagcggcacgcgcagctccagcaccggccgcttgtcgcgcagacagccgtccacgacgctctggatctcgcgcttgcgctgcgcgccgtacacgaagtcggagatggggcggccccgcacgcgctcggcgtggaagcccgtgatctcctccatgcgccggttccagaccgtcacgcggccgcgcaggtccacgcccacggcgggcgcgttggcgtccatgagcagctgcgccagcgcctccacctgcgacccgaagctctgcgcggccggcttcgtctccttcagctgctgctgctgcttggcgtcggcctctaccgcttcctctaaattgttgttgctgttctcgaccgccagtggcggcggcgggccggcgtcctcgccatggggccgcgccttcctgtgcttggccatggggtcggcggctccccccttctcaatggtcaatggccgagcctgttgcgcactgcgcgagctgaagactcagcagcacgggggagtcgcgtagatcaaccgggtagggacgggcgctgcctggttctacacaaatatcgaaaaactacgggtagtggcaaaacttcgtacttaagtatgcgaacccttttcccgtcgcttttaggtggtagaatagatttgtagtacaggccctacaaaattctgcattttaccagtgtgaagaaggaagaagaacgtttacgaagttcatggtaggtccgtactacggtacagacaatcctgtactaacggatacctgacaaacccgatatattgctatatccgatacgaagtcaatccaccgacttggtaggcaggcaaatgtatggagtaaatctgataactgccaaatgcgatatccgatacaagatttcgaccaacctgatagcgtctagcaagctacaaagaatctgtttgcgtggcatttacttctttctcgcgatgcatttgcttccgcacccgcgtctacagcttgcggaggtctagtagcagcttttcatcaaggtcgggatgctcagacagcatccaaataacgttccgaactggtgtcgcctgttcatccatgcttagatccggcgtaacaccctccgtttcgttaatgccgctatcgtaatatcttactcaaagcctactcacactgttcattatctccccgttcaagacatcatctgcctctttttgagagcgccaggtaaatgacaggcacgaattttgtgtgccgaaagcagttcaacaccaggacatccgctgcccagctctgatcaatacatgacgtactacttgtagagcctcaactggacatggggatgtagtaccagcatcttcacctggacgtgcggcctactgcaccgcaccaagccggaccagcacgtacatgcagagctactggcaatagaagtggttgcgttccagcggaccaggacgtacatgcagagctactgacaatagaagtggctgcgttctgcaggtgggtgttgttatgtgttcgagagacattactcatggattgatggctagtagaacagaaataccagtgagaatcactgctacagctggaatacattttggttactgtagtacttttaagcctacttgcatacctgatagtattgctatacctgatacgactgtcgtccacgggtgctatcaggtgtgccaggtttatctgtaccattgacaaaaatttgcctaaaactgtaggctccgaggtgccaactgttcgcaacagctggcgtgcagagaaagttgaagtggcacacactcctgcaccgagatgtcgctgctgttgtgaagggcttcaccatgtgaggggaacagcttcctgcctgtcagggccgctgcgttagcgatggcgtcgaaggctgtgcattccgacatctcttgcacgccggcgtgcaggcgagctgtcactcgtgataatccacccaccgcgccgccttggacaagccgaaagcactatccgcgcgacaagcggcagacagcgcaggttgcgagcgtgagcctcagaaccgatcggaccgatcgtcggcagcacgttgtgggccacaacttgtggcttcctggcgctctcggctgtcgcaaaacgcgtgggcagaagatcctcctcgcgcgggcatcacttgcagcgggcttcaagcgtgcagggcccgctccgtcgactatcgtaatgggctccgtccgctctcctccttcttcgctcgctcagcacgccgtgcccgacgacgcgaacgcgagtgcggctcgagtcaaagagctcgaaaatcaatcgcctgcccaagtcgcgcgtggctggtacagtcagcacatgtgcagaactcggtggtcgaatctggcattgccgggcggctcacaccatcacctcgagagcagcgattgctgtgcagcctgcagctggccaaggggaaatggcaatcagcccctccgttccattcgcgccgtgccgcgagctcacctgcaactccggcctcacatctgcaagcaacttgcagtccttcatgtttcttgtatttataagtcacatctcaactcagccaatacgcgacaacatccacgtcaacgtacatgtgtacgtgcacctgacgcatactgttctctttattcctctctacatgcggtcgtagccgacgctcccgtgctccaacgctaccaatagtttctccttgagagcagcacttgtcggatagtccgggaggatcaagcggcggtcactggaagccaaacaataatacatgcgtgattgagtgagatagatacacgatcaatacataacagtccagcttggtcaggagaagcttaccaggtattggccatggggcagaagctcgcctgcatccgcgtgtccacgtcgatgtaccagcacgcagtatcctgcacatttcaacagccatcactgttaattgtatgtggcgacatttggtcaatactggacaccacttaccgcattcatggagcgatacttggactcaaagccgaaaacaggaggcaacggcgagcctgaccagaaagtaagcagcttcgagcgggtctcttggtcgaagctctcggcaatttcccagaagtgctggataactccacgcgacggcgacattcctcgcgagtagatgacgtttttcttcagtccttcaaaatcgatcgtgcgctcgccacgcaccaaacgacgcagttcctccgagcgaaaaagcttcaggtccgattttacaatcgtgtcggcaaagccgtcacggattttctggtagtagaccagttcgttgccgaagaagtgctgctgggcacgcagcaagacgtactgcgccttgttggcgttcgtcacttccacctcgcccattcccttttgaagctccatctccatactcgtcgttacgggagaatgcgagggagcacaaccagcatcttccgttgccgctgtagattcttcacgcggctccttctgcttcgcatctgcctcctcgtcgacgaccacaacgtgtatagtatattcgaaccgcacgtccagcggctctgcatcaaaatcatggtccagcacaaattgaagactgcgcttgaacatgtcgctgttttcacaatagtcttcccacgacaaagtaccgtcccgcatcatgaatcgccagaacaccagaggaaagtctgcagcaagcggctggtggttgcgaatcgccagacccatcaagcggccgatgcagagatacacctttttgagtgcgtccacctcgttggagtccacgagcaagtccttctgcgtgaggcttaagctcttgtctttgcgtttagcttcaatgacctgtttgctgacgtacgccggccgcagcgcaatcgtaagcacacctcgcctctgcttatccacgaactcaaacaaggggaacagctcgacaaaaccgccagttcgtgtcggtcgtcctcgtttcgcccgactccccgtgtcagtgtcgccgcacttcttgttagagctgccatttcttggactctgcgaccgagcaagctggagccactgcgccccaatctcgagaacatgaggtgctggcttggcaacggaaccttggacttgcgagttgccggtcgagaagaagtacctttggacaatctggaaaaactcgcgcgtgacaccgacacctacgcctggttcgttgatcagcgtgatgttcatttcgcccttcaggttgctcgccgacgtgctgagaatttgctgtaggatgaagtccacatagtttgcctcagacgcgcgactgatagacactgataccgatccgttgcgctcttcggccagcatggccagataatccactttgtgctcaaggcggatgagccctggaatcgacgcgaacgcatacaagtccatgcccaacactttaggatcggatcggatgagcacatccacactgttcttcagtgggataacttcatcagtaaaagtgcttgggatcgggaacgacgtagcaatcgtctgtaaaagctgtgtttgctccgcaacaaacatcttgacacgctttttcttcgcttctttcttgacaaatcggtccatgatctagcaacacacccaaaagaattagtctacatgcacagcaaaataagacttgcgatagccatcgtaccttgaacaacttcgtaagcgtcgcgttttcatcgacgacgaaggcggcttccagctgctcaaacacttgcagaaggtgaaggagcagcgaaaaacgctgtggcgttgcgatggcgtcatccaggcttctcagcgccgcattcaccaaagaccatagctgtttgacgggcttgatcgcttgctgaaaactttcaccgatgcccaattccttcgcgttatctccagagcgaatcgtacgagcgtacggtgcgaagaactggaggaagagctcaacgagcgagattagtagatggaactcgatttcttcgtcgtagctttcatcttcgtcaatatccgtccgatcaaaaatgcagaacgcgagcttggttcctaaccaaacatatacgattagaaaatgaatcaaactccagggcaagagaaagaagctcacctgaacggtagagcatttccgtaatgcgctcgaaaaactgcagctggccgcattcctccataatgggtcgcttgtcggcagtgagaggcgccccatcagcgtaaggatctagcaaatgcatcaaaatgagactccacaccttcacacgcctcgaaagactgttgtaggacagcattccgttcaaaatcattttgaacgcttcgtgagatagctccagcactcgtggcacgctctttttctcttcttcatcaccgagagcagcagtcttcacgtccagattgccgctcgattgcttgtcgagcgctcggcgccagagagactggtattccttcgcatttttaaccgacagtggatacacagaggccacggtgtacatcagtccgtccgtatacacggccttttccttctgtgcatccggcatctgagcaatctataacaaacccaacaacgacagcaaatttctccgttaaaccactgcaagcattctggccacacccaaaatctatggcacgtacttcgttgagaatcggcacaagacccacttccgcaagcagcagtgacttaatgtaaagaccccgaacaccttcatcgcccttacgtgagaaaacggaaccgacccctgttcatgccatcggcagtagtagaaaaagcatcagtacagtacacaccacgcctcatttttctttggccacgcacccgaatccttcgttagctccagcacagtccgtgtcacgtggaaagcttcaacagcacggtccggccgtgaccgcgtaaacgtctgcttgtctgtgcagtatcaccagaaccacgcccaagtcagcccccgtcccgatcagcttgactctaaagcaccaaccaacttacctgcttcactctgctgctcctgctgctgttcctcctccttctcttcctcctgtttcttctgcctctgcttcttgcccctgcctctgcccttgcctctccccgcgtccgcctcttgccttggcggctcgcagaactgcagcgacctggcctggaacgcgttgagctccaccacgtgcagcgccgagtgctccgccgcgtttctggcactaaagtccgcgccgaagccgcgcagcagctgcagcgccttccagttgcccagccccgccgccacgtgcaccaagccgttgagtttgtcgggcctggcgtccagcagcgccttgagctggccgcgctgctgctcgtagtccagcagctgcttcaagatctgcagcgctgcgtcgttctgcgcgtccgagcggccgttggccacgcagaagagcaggcagacggtggcggcgttcacgcgcccgtaggccttgagcaggttcaccctcttctgggactgggccagcagcagcgccaccacttgcggcgccagggccatgcacgcggccacgagcggcgtgagccccacgcggttggcgctgcggttggtgctggccacgttggcgctggcctggggcgctgccagcagcgccgccaccatgtccaggcgcgcgtagcgacaggcctccaccagcggcgcgtcgccctgcggcatgcgccggttcacgtccagctcgggcgtctgcagcagcgaagagaaagcggggaagtcgtcgcggcggatggcggccacgagctgggacgcgacggacggctcggacttggaggcagaggggacgccggtgctggtggaggtagcgccgctgctgttggtggtggtggtggtgggtttggcagcgcgggggcgccggggtcggcgacgcccacgtgccgaggtcgaggtcgacgccatggagtgatcgtcggttgattgccttctttcggctcgccaaagattggaattaaaacgtaatttagccaatcaaaatcgtgtataattgcgaaaatatgtcttcttgagaaaagaaaaacaagaagaaagcatgtttgaagaaaggtaattgagaaagaccgaaaacattctttctgtgaggcagttgacgttagtacattgtattagctcggtaatgcagcagatcacgcgcgtcgagaacgccgagcgctggttcacatggcgagtggcggatgcggactccagtagtgactggcgcagtatgtacccgcagttggactactgtgacttttgcctcggcttcccaagcgaacgctttgagtttgaggaagagcgcgacgccgttttgctgcaattcgtgcgcgagttgtcggagctcaaaatcggcgaggtctcgacgcggtgggacgacaactgtcagtgggaacaccgcctgcccatcgacttccagcacgccaagatccgagtgggtgacgtcttcgactactacaccaccagcgagggtgtgttggagatccccaagccactttcccgtgatggactatctggaaaatgacccacgaattaaattccacccggacagatttcgtgaatccgtcgagcaacgcggtgttgagcacttggaggagatgcagtaaagattggtggggtgcgtttttgggctggtgaaggaggaaacaagtcgggccactttgtcggagatgtaattgctcctttttgagtcagtacgcgttactgtacaacgaacaacatatttctacgtagttgagattttgccattttcaatcgcatcatgccaaaagctagcagctctgaaagaattaaccaagtgctgatgagagatcactgctacaaatgttcttagttacagctcaaacagacgtggagaaatagctgtacgtcaattatgtatcgaagcgtcaatgcgaacgcggatacacacagtacatgtactccgaagttcggagtccgaacctattcagggacggctatgatgtaaacgccctagttgtcgtagatttgtacgaataatattctttcgcgagatcagtcggctaaaatggcgttttctgcgagtactgtactgtaggctttccggcgtcaccgtcatggctgacatccggcacctcgacagccagctccgtgtttggattgcttccttctggccgcactcgccgctaccaaagcgaagcctcgatttttttcctcacagcctgaccgcttcggcacaggcagctcaatctgccagctatcccagctacgtgaagcttggcgccagctggagtgcttcagcaattttttctgacagtaaagtgcaaccactggagagtgcttacgtacacagtctttttttgatgggggtcgagggggggtgaatgtgatatagaagaggaccaacggaggctcgcggttgcgaggagcgtagccgcagcaaacccgcgcggggtgcccgcgtagcagggccgcgcggtatttgcggaggcgggcccagcgacgagcattccagcgagccgagcactgttctcgccaggtgagagaatctttttatcgcaggagcgcagcgactgcctttgcggagcgcagcggagcaaagccatttcccgcggatgacatccgtcctgcgggaaggtcgtcatattgtggggtgatgggctgctatacaaactccaagatatcaccgaaaatagactgtgtacgtaagtcctgccgcaaccactgcagctagagtaatggcagctcccgttacaaatgtcgtaaaggcacctacacttcacctttgtcggtcgtagcaacgttgcatggtccgacgtggcggcaaccgtcacggccagcaaaaaatgcatcgaccaccgcaccaccaccagcataccagcaaccatctcgtggtctccggtgcttgcagccaaactccgccactgtacacatcagatcgaacttgctcgaggcgtcctcgcagcaaggacaatccggtagcaattcacaaagaattcagtgcaatctatccgaacagccccttgtgttgcgcgacccatctacgcgattcacatgctacgtagcgcaacgtactatgtgaatcacctagatgggtcgcgcaacacaagggtggcccacaccatgttacttgatcgattttcaccttttttcgccgaaaaatcggcaatctgtcccgcctttttcccagtcgcagcacgcaaggtacagtacaaagtctccttcgcgacgttcagtccgtctcttagtcgcacaagggcaagtgttcgaccgatgcccgcctccgccgccgagccgcaggacgacggcctcgccgtgacgctggacgccgtggtggccgacccgcacctgcacgcgctgttcctgcagcacctgtccgcctcggaccccaagggcttcgcgcggctgctcttcctcgtgagcgtcgaggagttcaagaaggtccccagcgaggacaaacactctgtttcttcttcttctcccagcgcccccgatgatgacgccgccgactccgacgacgacgcgcgcgcgcaccgccggcagtacgcgagcaagatcatcgccaagttcatgcggcccgacgccttcctggacatcacgtccgagaacctgcgcatcctcaacaagtcggtctggagcttcggcaagctgctgagcaacgacctgatgctgtactcggggctggcggccaagtccgacctgttccaggatgccgaggtggccgtcaagagggcgttgcagcccagcttccggcagttcgcggccacgcccgagttcgcggcgctcgtggccagctccagactcacgtacgtggacgcggacgacagcacggacgaagaccagcagcagatggaggaggagaagagccccgcctccgtgtcggacggcagcgtgggggtggcgtcgccctgccgcgcgccgtcctcggcgtcgtctacgccgcggcagagtcgcgtccggagacagcgcacggccacgacgtttctgacgctggagcgggtgctcggcaaccgcagattgtgcagcgtcttctgggtgtttttgttcaaggagcgcacgcacgagcagctgagtctgtggatggactttaggtaccacctgctgccggtgctcgaggactttatcaacgcgacgcaggatgacagcgaggaggaagatggaaagcaggagaacgaccagcaacatgacagcgaggaacgacaagctggagaactcattgagcagctgctggcggtgggcagtcgcattgctgccaagtacctgactgcgagcgcgagtacacgtgtcacttttgtcggtgatgcggagcaggcgctgctgcgcgactacgagttacgggtggcgtgttgtctggatgctggtagcttctctctcgcggacgctgaggttctgctgcgaacggtggagcgcattcaatcggtcattcaagccaacctcaaggtcaaccacttcgttcgctttatgggaagcgaatcgttcaagtcacttgtggcatcctatcaaagtcgcctgctgagcccgtctggtgcctcgaatgccgtcacggccgcggcctgcgatggctccagtactgcttcagacagcagcatgactacgctgcaggagttgttccagtgcatgaatgtggcatcgcaccaaccgcagcgggtgcgcagtaaatccttcacgctacgggagctctttcaaggccagttacgtggtgaaccgcagagcaagtccctcgtcagctcggtgctgagttttcggctggatgtgaatgaccggtcgcgtcctgaaatcatcaaggaagttttgcacacgctggcggacccgaacaaccgcagcgaaagcagcagtgacctataccatcatcacgccattccggatcatgtcgaggctttcttccgtccggcaggagcggatgtgatccgctccacaactcgtccggatccctcgctttttcacatgactattggaaatgccgagaaggcgttctatggtgcctgcctcacacgatacgtaccgctgaacgactcgagcaaattgggtccgttggaacaagtgctgcaagagaccgagggcctcgaagtctacgttcctgctggtctgtgcatcatcagccggtatccgattctcgacacgcttaagcagcgccttgacgctctacatgcggccatgcaggacgatgaggcatacctctccgatgtaaactggttgccctcggcagcacaaatggctggattactctgcccgttcgactttgctgccgccacagccactgaggacgccgtgacttctctctcggcactcgacaagtatgtggatttcagcatggaagagctgttcagctgtctctcggtcgagcacgtggtcgctctggtgacgtgcatgcttcttgaacgacagatcgtgctagtgagctccagatattcggtgcttacgtccgtgggtgaaacattgaagagcttgattgcccctctgcagtggagtcacgtgtttgcccccatcctgccaaagagtatgatcgagtgcttgcaatgccccactccgtatttgttcggcgtgcactcgagctatcgggcggagttgcgcgagatgctcgagcgcgaagggtgtggtgacggcattgtcgtggtggatctggatgcagacacgatgagctcacctggccgaccgcagcttccagaatctgtccgtggcccgctctcctctcgcttgctgcaactgctcaagccaaaggtgtacttcagcgacttcgtgccgatgctcagcagcaagacagatgcaatgcaggcacggcggtttccgcagggccatgtgcggacttgcttccgtgaggcggtggcaactctgcttcggacagtcgaggagttccgcttcgtgctctccgacgattttgactacgtggtggtttttgaccggatcgcattcatgcgccgactgccacctcgcgagcagtccttctaccgcagcttcctggaaacccaagttttctcgcacgagattgcctcggtggatatttaggctatgtgaagcaggtgtaataacgttagaatgaaaaaatgcaaaaactagattggtcattagtacattgccgttcggtatcctacattgagttgcttccagtacaagtaatacctgtcacagcttacatgattccacagggtccattgcgatcctgaaccgagctgctagaagaacgcaaggccgctgcttgcaccccacttccgctcctggacaggccgcggaactcgaagttacgacgaaggtatccgcgtaaatgtctgtgctcctttttcaacagagccacagagtcatccagcgacttcttcagtgagatcatggctgccgcgtcggcaagcgctgccggctgccgatcggtgccaatttctgcctgaccctgttgcagctgctcgcatgcaacttgtacgcggaatgcggccttagatacacgcatcgcagcaacatacgccgatgaacccttcagcgaatgtgactctcgtcgagtcaccgcgatatcaccttgcccgtacgctgccaaaatgcgcgacataatagcttcacagctcactgtgaacttttcgagtaagctcatgaagagttcttcgtggccaccacactgctgtacacccaacgaatagtcgacggggtcaccctcaggaatggcaatgctcgccgggtccatcgttacgcgcatcgcagcatcactctcggtggtagcgctcgcatgatcgacactgggtggtcctctgacgccgcctctagcggccgggctactgatattcaaacgctcaagcatagctgcaatcgggtctcccgatgcttgatcgtccgagctcttgtccgattcataccgttgcaaactcaaaggtgtgttgtcatctcggccaccttcagttactgctctagttcgggcactctgtgcctcggaaacagagttcggcgatagaggttgctgagaagttgcggaagttggggccgaatcctttttgtccttcttgttgcccatgaagggcgggtggctccacaaagttggattgctatgcgatgacacgtgatcagatgtctcggtaccttccagtggcttgtccttcatgttcggcaaggtcgcagaggttttgttaatctgcttccagtctggaatgtcaacaacagcaccaccagtatcccgctggagtgtcaagaggccactagagcgggtactgtttccaactgaagatcccaggctgaagattgatgttgttggcacggcggtgcgtacagtaggaccaatctggcgcctaattgccatggggtcatccaactccaagttcgaaatcgctcgcgcgagatcaagctgctgcatgtggcgtgaggccggagcaagtctggaacccgattcgtcctgcccgctgtagaggtccgcatcgtcagcatcactgtccagcgatggccgcggggttggtgatgtactcgggtatgcagtcggtacaccatcaagctccacacccgcgcgagatcttgatgaagctggcgatgaaacggatcccattggtggagcggcaggagcggcagaagtaggtactgcctcagaacttgcaggaggaaaatcatccgatccagcgacagaggaggtcgaggccgtcttagggccgagataacgaacgcgcatccattgtcgaatagccttcaacaaactattcttcgagatcggcttcaccataaactcgtccatacctgaccccaggcacttttggcgatcgccgctcatggcatatgcagtcaagccaagaacaggaatacggggtagatcgttttcgcgttcaaactgacgaattgctttcgtcgctgtatatccgtccattacgggcatttcacagtccatgaagacgagatcaaacttggtatggttctctgtataagccttcacagcatctcgaccattcacttcccattggaggagatggtctgcctcctgaagaaagcacttcaccacttcccagttaaactcgttgtcctctgccaccaatatccttgcctgccgcggaatcacaacctttgccgtgttagcagcatttgcagcagctgcgcttgcagtgctatcgcttgagtttacgttcgatgtatccatgttagggggtgcaacgccagcatccgtgagtagttcgttcgcagcatagaatagccccttagcgtcaatatcgtcaagcagacggacaacaactgtgaagtagaagttgctgcccacgtccagctcactgtcgacaccaatttggccatccatcagctcagcaagctgcttgcaaattgcaagtcccaaacccgatccagtcggattgttttgacgagtgcgctcaagcttcgtaaataaggaaaagagacgcatcttctcttccgcgtccataccgatgccggtatcgatgacttggaataacaacttcttgaatgccttcgggagctctggcgtgtaaacgacactacatgtgaccgtaatagagccttcattggtgaacttgatcgcgtttgacagcagattcaacagaacttgacgcagacgcacgacatcgccaattgcaaccttcggcacgttgtcatcacacttcagttctagcttgagtccacgctcccgggccttgaacttgaaaatctcaatcgaatagtccaatagttcatgcatctggaagggagcagccgaaatttcaagatgcccagcctcgatcttcgacaagtccagaatgtcattgatcagattgagcagtagcgagcctgatacatatgccatgtgaacgtatctctcaggagccttatcgaggggctgttccttcagtaactccagcattccgagcacgccgttcaacggggttctcaactcatggctaaaggaggccaagaagttcaccttggcagcttccatgtgcttccttgcagtgtaatcttgtccaacaccaatcacaccacgaatatttccatgcatatccttcttacttgaagcgttcacaagtagcagcaggaacacgccacgcttcgtcgtcatgggaagctccatctcgccaacgtcaataccaatcaacgcctggttcagcaactgtcgcacttgctgtctgctttccggaataatgaaagtatggactagcgaaagacccagcacagttgacttgtggtagccagtgatctcctcgatcttctggttccactcgttaatgcaaccattggtgtcaatgccaaaaatcggggcgttcgccgtatcaatcagtcggaagtattcatgttcctgggcgatacgatcggtgatgtcttgaccgatgccgacaacgccaacgatgctaccattagaatcgtatcgaggcgtcgcgttaagtaaaatctcgattcttgtaccggggcgcgtaataagagggaattcaaaatttgcggtttcgacgcctctcagagcttgagacagcacttcagccacaattggtcggaactctggcgaaataaaggtctcgactaggttttcacccataacttcgtcgatagcgtaatttgtgatctgtgctgccttcctgttccagatattgacacacatattggcatcaacgccaaaaatgggagcgttggctgtgtcaatcaggcgactgtactcctgctcctgagcaatgcgctccgtgatatcctgaccaatgcccaccatgccctttacttcaccgtgttcattgtatcgaggcgtggcatttaacagaatctccacgcgtcgaccagccttcgtgatcaacggaaactcgaagttcgcggtctccacaccttcgaatgccttctcgagcacactgcgcacgggcaccttgtattccttcgaaatgaattcagcaaccaggtccttgccaagcacatcctcattcgtgtactgcatgatatcggcagcctttcggttccagatattcacacgcccgcttgaatcaacaccgaaaatcggggcattcgccgtatcaattaaacggctgtactcctgctcttgggcgatacgatccgtaatatcctgtccaataccaaccatgccgatcacttccccatgttcgttgaaacgagacgtagcgtttagcaaaatctctacacgccttccagcctttgtcatcagcgggaactcaaagtttgctgtctcaactccttcaagtgccttggacaagacaagaccgaccgcttcgcggtagtcctccgtgataaacttctccaccaggttctcgcccatcacatcagtcggtgtgtactgcgtgatctcagcagccttcttgttccagatattgacgaggccattcgcgtcaacaccaaaaatcggggcattagccgagtcgatcagtctagcgtactcctgctcttgcgcgatgcgatcagtgatatcctggccaattccaactacaccaacgatgtgcccgtggtgatcgaaacgagctgttgcattcagcaggatgttgagttttcgtccatttttcgtgatgactggaacttcgaagctggcagtctcgtttcctcgcaacgcgttcgacatgatatcatatacaattgactgatactcgggtgcgatgaaagtttcaacgtacttctcgccgagcacttcctccaggttgtagttcgtgatctgcgctgccttcttgttcaaaatattcacgcacatgtctgcatcgataccaaagatcggggcattggcagtatcgattagtcggctgtactcctgttcctgagcaatgcgatccgtaatgtcctgaccgataccaaccatacccatcacttcaccctgctcattgtagcgaggcgtagcattaagcagaatttccactcgccggccagcttttgtaatcaacgggaactcgaagttggctgtctctacgccttcgaaagccttttcaaggacacaacgaaccgggacacgatactcttccgatataaacttcgcgacgagatcctccccaagaacatcctcggtagtgtactgcatgatatcagctgccctccggttccaaatgttcactaggccattggaatcaacaccaaaaatgggggcattcgccgtatcaatcaggcgcatgtattccttttcttgtgcaatccgatcggtgatgtcttgaccaataccaaccatgccgatcacttccccatgttcgttattcctgggtgtagcgttcaacaaaatctccactcgtcggccagacttcgtcatcagcgggaactcaaagtttgctgtctcaactccttcaagtgccttggacaagacaagaccgaccgcttcgcggtagtcctccgtgataaacttctccaccaggttctcgcccatcacatcagtcggcgtgtattgcgtgatctcagcagcctttttgttccagatattgacgaggccattcgcgtcaacaccaaaaatcggggcattagccgagtcaataagcctcgcatattcctcctcctgagcaatgcgatcagtgatatcctggccaatacccacgacgccaacaatacgcccgtgctgattgaagcgagccgtcgcattcagtaaaatgttcagcttccgtccagtcttggttatcactggaacttcaaaactagctgtttcatctccatgcaacgctttggacataatgtcgtacacgatagcttgatactccggcgcgatgaacttttccacatatttctcaccaagaacctcctcagctgcatagttcataatttgcgctgccttcttgttcagaatgttcacgcacatgttggcgtcgacgccgaagattggagcattagccgtatcaatcaatcggctatattcttgctcctgcgcaatacgatccgtaatgtcctggccaatgcccaccattcccatcacttctccttgctcattgtaccgtggagtagcattcaacaagatctctactcgccgtccggccttggtgatcaatggaaactcgaagttggcagtctccacaccttcaaaagccttttccaggacgcttcgcactggaaccttatattcttcggaaatgaattctgcaaccaagtccttcccaaggacatcttcggtagtgtactgcatgatgtcggcagccttccgattccaaatgttgactaaaccattcgagtcgacgccaaaaattggagcgtttgcagtatcgatgaggcgcatgtactccttttcttgcgcaatccgatccgtgatgtcctggccgattcctaccattcccattacttcgccttgctcgttataccgtggggtagcgttcaacagaatctctactcgccggccagatttcgtgatcaatgggaactcaaaattcgcagtctcgacgccctcaaacgccttctccaagacactacgcacgggaactttgtactcctccgaaataaattctgcaaccaagtctttacccagaacatcctcgttcgtatactgcatgatattggctgcctttcggttccagatgttcacacaaccgtcagaatcgacaccgaagatcggagcattcgcagtatcaatcagacgcatgtactcctgctcttgtgcgatacggtccgtaatatcctgtccgatacccaccatgccaataactgcgccgtgctcattgtaccgaggcgtcgcattaagcagtatctctacgcgtcgacctgttttggtgatcaacggaaactcaaagtttgccgtttcaacaccgcttagagcttcagaaagcacatagctcaccgcctcctggtagtccttcgtgataaatttttccacaaggtgctcacccataacagcatcggccggatattgcataatctccgcagcctttttgttccagatgttcacacggcctttagagtctactccgaagataggggcgttagcagtgtcgatcaatcggataagctcttgctcctgcgcaattcgttccgtgatatcttgtccgatgcccacaactccaaaaatttggcccagctcatcatatctgggagtagcatttagcaggatctcaactcgacgtccagtcttggtgatgagggggaaatcaaagttattggtttgctcgccttcaaaagctctttgaagctccagttgtactgtagctcgatgctcctctgcaacgaagcggttgaccagatctttacccatcacctcttccgctgaatattgagtgatctcagcagccttgagattccaaatattcaccaagccatcacgatcaacgccaaagatcggtgcatttgccgcgtgaatcaaccggttggttcccttttcctgtgccattcgaattgtgatgtcttgcccaatacctacaacaccaatgacgacacccttttcgttgtagcgcggtgtggcatttagcaagatctcgaggcggcggccatcctttgtgatcagtgggaattcaaagtttgcggtctcctgtccctctagtgcttgagacaacaccgtccagaccgcctcccgaaagtcctcagggatgaagttttcgaccaaatttactccaagcacttcttcattcgggtactgtgtcgtctcagcagctttgcggttccagatattcacacagccatttccatcgacaccaaagattggagcattagcagtgtcaataagacgtgtgtactcctgctcttgggcgcgcctgtcagtaatatcctgaccaattccaacagccccgcaaacgttgccaaagtgatcgtacttgggcgtcgcgttcagcaaaatatccagtcggcgtccacttttagtgatcaaagggaagtcaaagtttgccgttcctgtcccctctaaagctttcgacaaaactttagcaactgcatctcggtagtcctcggatatgaatttaaacaactcctgtccgatcgcgtcctcgtttgtatactccgtgatagcagcagcctttttgttccagataatcacctcgtaattgcaatcgacaccaaaaatgggagcatttgcagtgtcaatcagccggctgtactccttctcctggatgatacgatccgttatatcctggccgatgcccacgacgccaacaagcttccctgtgtgatcataccgcggcgtagcattaagcaggatttccacctttcttccagtcttggtaaccaacgggaactcgaaattcgccgtctccgttccctgaaacgcactctggaagactgcagccactgcaggtcgaaactcctccgaaatcagcgtgtcgacgagatcaacgcccatgacctcatctggcgagtattcactaatctgcgcagctttcgagttgaaaatgaccactcggccctcggtatccacgccgaaaatgggcgcgttggccgtctcgatcagtttcctgtactccatctccttggtgtttctctccgtgacgtcctgtccaatagccacgacgcccatcacagaccccagcgtgtcgaacctcggggtcaagcacagcacgatctccactctggatcctctggccgtcaccagcggcagctcgaaatctgcgcctgcgatgcccgtcagagcctggttgatcttctccgacacgattttcctgaagctctcgtccactacaggcagcaggggctcacccaccatgtccacactagcatatcccgtcatggacacagtcttggagttccagaccgtgatgttcccttccttgtccagctcaatgatgggcgcgttggcctgcatcatgaccgtagcgtactgcttctcctggatggcccactccgtcacgtcctggcccacgccgtagacgcccacgcacgcgccatcttcagccagcaagggcgtcatattggtcagcacctgcgcgttgcggcccgtggtgtttctcagcgggatgcgcagctccagctccggccgcttgagctcgatgcagttctccagagtctccatgacctcctgcttgcgctgcataccgtacacgaagtcagtcagcggacggccgatgacgcgcccggcctcgaagcccgtgatctcctccatgcgcgggttccagagcgccacgcggccgtcggtgcggacgcccagggcgggcgcgttggcgtcgtgcagcatgcggaagagctcctgcacgcgcggccaggcagcggagcctgcgtctgtgtcctcattggcgtttggtgcgtcggtcggcgctggtggcggtgctgctactgcggcggcgtcgggcggccggcggccgcgcttccccttggacggcgccatggcaaaatgcggaatggagtgattgtcacttgaggtctgtatggggatttgtatgggtgatggccgctgacgacatgtacgtgcctgtctgagcagtcctccatgagggcgcgaatatagacaggtaaaaggtggatttgtgtgacacgagagcgatttaaggagatgttaccccgttttaggatggaggtaagtgcgcaaacgatcgtgacacgatgtggcgcgggtgcatcaggctcgaaagaaatattgagcggggacgattagagcaacgggctctacttggcgaggttgctgcgcgcaagctcgttcgttgctgctggacagcttgatgaactgtgactcggtgatagaggctgctttcttgtgagaagaatatgtattgagcatggctattggtgggtgcttggtgccgctcggtgtaagaagtggcagacgagttcgtctgcggcacctcggtcgttaatcgacgctgacgattcctctgaagcagaagtgtcgagacgattcggtgtgaagacgcgagggttaactcatgcaacgagcatcgatcgagcaaatagagctgggttgtaggttgcaacaaaactctttgagcgggactgtctcgtgttcatcgctttatacatgtatttgtcgattcagatactggcagcccacaacgcatcgcgcagctcaaggcgcaatggtcgtaccagctgcacttctcgtacagcgaatcaccctcgtctccaccgccgttgccggacaacgaggaccccaatccactcgcttcaagcggccgctgctcttcttgaactctcaaggccttggccactagcggagtgacttcagcacgtgcatccctgaaagtgatcgtaacgatgacgagcgtggaaatcagcttgaacattttccgacgaggacttgcttgaggagttagaggcgagttggcaaatggatgtggcctcataggcaccagcaaggtgcagacaatcaagtaaaatgcgcgccatgtgttcttagaacgcctcgctcctgtatttctgcaggttcgacggagcatagtcgtcgacttgtcatggtcacttcaatgtagccatctccatgttgtgcttttctactaagtgcgacatccatcctaagtacgacgggtatcattgtcgcaatgagcgagtttcgccaagctacagcgcatgtggacgcgctcgagacgcatctagcgcgcgtccagcagtccgttgccaataacacaaccgatgtcactctagaagagagcttcaacttcattttggtgggttcgcggccttcctgcgcgcaaaattgacgtcgcagtcgttatccgtagctcgctacgcgatgataacattctccactaactctgtaatactgtcttcatctgtgcctctgcagactgctattgcaggtgatgtggacgttatgatcgagaagtttcgggcgcgctgctctatggtggatcccgtgacgaaccagcctcggttcggccctaacatgctggcaaaagttcaagatctgctgcgtcgctacgacgaagtgaagctcgcaatggaggaggaggccccgctgcgtctgcaggtggaagcaaaggtcaaccagttgacagctgaagaggctgccaagaagcaggaacaagctgctcaagagaagaaagagaaggaggctcaacgtgcagcagagctggctcgtgaacaagagcaggagcggcatcttcaaggagctcgtgagcgagaagcagagcagcaacgcgaagaactgcagaggattgaagcgctggccgctgccgcgcaggagaaacgagagcagcgagagaaggaacgtgctgaggaggaactactgcggcagctcgaggaggaggagcgtgagaagttgaatgcgtcgattccgcacggcaaggaggggctcgagagagctattgcaatgctgaaggatagcacaggtagcgaggtgcgtcgtattcgtgtttgttgttagggggagtgagtgagtgtgcttacgtttggggggccaggcgctgtatcgtcaatctctgcagaagctgttggctgttgtcagcaacatctgctcgtcaccggaaaatactgcgttccgacacattccgaaggaaaatgcccacttccacgcggacttgggtcaatacgccggtgggcatcagtgtctacttgcgctgggcttcaaggaactccaacaaggagatgaagcccagctcagagcggtcttcgttttagaggtaacatgaaatggtgtagtatataatttattatattgtgagctgactggttcgtgtactactataggaacccgatctatcggaagatttagatgcctggagcaactggttcgacgagctcaaggagatgcagagtttcgtggaatacaagttgaattgaagatgctgctggaataaaattcatgcggatcaccctggcaatcctgtctctattgttgtcagaaagtttatacgttctagatacattggatattgttgcgggactcctttcgcacgagctcgactacggcagggtgggtcactttggacattaccgtggcaaactcatctggagtgagacagacaatgcttcggccctccgaggtgaatgtctccaacgcagtgaaaaagccgtcgagaggtcccgactcggtcgattcaggagcagcttcgtgtccgtggtgtttctttcgcgcgcgaatgtgcttcgtgatcaatttcatggtgaagacaagccctgccgatgatactttacccgaaccgacagcgtccaagtgctggaaaaagcgcgtgacgtcagctgagctgaggctagctgtgttctcagcattggccactggattgaactcaactcttcgaagaccttctagcaccaactccacctccattttcttgcgaacttcagcatcgagaccacgcaagatccgctcctgctctcgtgaatacttttcgatctcttcgacgcgagtgcccacaatggtgcagtcgcgatagcttttggcttggtcagcagcaagcttatcctctcttgccgttggtgttcccgacggaggtacgccaaccagagtgctcaacatcggcccaggatttagcgggaagagggcgctgtcttgggccaccgagatctccatgtggagcatggcgaaccacatgaatgcatcgtcgtcaagagccacgttcatgaacacgaccgagcgcaccagtgcgttgctcgtcgccaccgtgagcttgataccgttgaagcagtcatcgtcgctgaacagctcgacctcacaatctcgcaacgcaacttctaccagtgtatcacccttgtggttttgtgcatcctcaacgcggaacatgccgtttgccatgcggcatcggtggaggacccactcatcagcagcgcggaatttcaccttgagactgccttccttgacggctggagcacggaagatcagccgcttggcctgcttgtagcaccccttcttctgtcgcagcgtgtgccaaatggtgtcgaccgagtcgtgcatcatgccgaactgcgagatgccgaccaacacgcttccctgtgggataatggcagacgaatagttaatctctgatgccggagttggcgactcgacaggggacgacgaccccgacgatggcgacaaggttctggctgagccgctggacgtggcagtcgtcagcatactcactcgacgtacgagcgctgccattgtaactcgtctcggagattttggtacaactggctcgtggctcaatgcgaagatcctcttcttgtgcttctccaggacaataccagcactagcctccgaggccacatcgagcgtgtagatcacactgttgcgcagtaatctctggatgtcaccatggaagatacgttggtagcgtgctcgctccaccgcagcagcagctccgcgaatcacgtccatccagcgacgtgcctctgcggcactccctggggcgaaagatacttcacaaccgaggctgcgaacggtgaaggcgttggccttgtccagtagtggagtgactcgacaagttggcagcaattgtacttcgaagatcgatcccagcttccgctcgctcttcttcactcgcagcatcccgttgtcgagctcgacgtagtgctgcttccacggccctccaggtttgggctgggcttcaatgaagccttgcacttgatgcgggttggcttcctggctgcctgctagtcccggttgttttcgtggtccaccgttgtggcgatacttcaacgcgataattcgcaatcggatagcgaggatccaatgcgtccgtatctgttctgttggggctgccaggatgatgtaagcctggccggttgtcacgatgaaggggtaaaatgctgctacgttcgagcccttcggtcgtacttcgttgtttttcaagctcgtgtctccagtatcgactccatttctgtcctcgttttcacggcgcattttctcgatgttcttgatacttctcagcgtctgtggtgacggatcgaccgggatggagtacgacgcaaagaccgagagctgccgcaagtacgtcgtgctctcttgtccggaaaagctggtaccggtgagtgcgaactgcttcatagttttcgtcttgtggtccgagggtttgcagaatcgaagtgtcgagcgtccaagctccacgtaccgagccttccagcggtatttggtgcgtaatacgaagcgtttgacttgctggttcgcagggagctctttgcgtagcatcaaggggcccttgagcatcgtcgaaagcgcttcgagtcgttcggagatgtgacgataccacaggtcggcctcttcttgcgtgtcggcgacgtagacttcggtgcctctgtctgtggtcaggcagatcgagtatggcggggctcgaggattcagctccaagtagtaatgaagacgagttgtggtcgagaggaagtacgtcgcgtcaatcttggccgtgaatgtcggacgcgggtcggacaggtaatagtccatgcgcgaatccgagagcaccacaaacgtacgtctccgcttggcatcatcgcgtgtgccaatctgcacctgcaagtagccgcaaaggacgccgcggatgtagtcttccattgcaccaacaaggcaaaatggcgagtggtgcaacccaaaagaggtgcatgacggtaagaacgcgatgaacttcatggctcggctaaaattacgcgtgagctaggccgatgtgtcatgaaataacgatgtgagaaacttttgattcatgtcttatcctactgaggtgtcttgttagacttgtcgtggcgttagcgcaagatatgtagcacgtcagttttcggcgatagccgtggtagagttgtgttgctccacagagctatccgcttcgcgatcgtggttcaaaaaatgggtcgtgagcgagttactgctagcagatggactgatgcttggcgaggggccgtcgctgtcgtgctctggctcggtctgttgagcagccaagcccttgtctcccgcttgcatttcagtatgaccatcaattccatcgccagtggcttgtagaacggaggcggtgtcaccttcagtgtcagcgaagtcattttccgtggacgaagcgctgcaatcgatacgcaaccgagcgtattcatcacgagaggaaggatgttgctcttgatctcgcgctcctcggtcttcgtgaccatgattttcaccggatcgtctgggttgagtgcctaaggcttcacgcagaggctcctggttgccatcgtagtcgaacgggacctttttggacgagatatcgcggatctcgaggcgagtcttccgcagcggccgacacggcttcgaggatggcgacgtcaccaacgactgggtggtgtcgttacacaaatcgttcacagtcaagtccgccaagtggaaccgacctcggctcccacgcgtggagcggatgaagtcgtggatgtcgctcttgacgtcgacgttctcgaactttggcgcgatgacctgccagtcgtactgctcgtttgccagggtcgacgaggcaaacacgacgtgcttgcggaggttcgtggcgatggtggcgatgcggtcctctgcaatttgctacggcaagtataacgttgaaagttaggggatacagtactcacaaatctcatgagttactcacaaagtagcaacattcagatctcacctggtaatccgcaagcaccgcttgaacagcgcgatacatcctgattcggttcacttcgacgccttgccacgattccaggcacttcctcctcgacttctcagcagcctgagaccccaccaagacaagacacagacaagttacttcctgtactcacaactacaacacgcattgccaaccgtacctccatcagcttcacggtgttgccagccaggtcctccttccggtggctctcggacgaccgcagccagttcacgagcttattgttgttgatcgatttcagcgcaccagcgccagtcgatttgtcgtggcggatcgttagagcggtcgaccctgccttcttcgccttcgctggactgtcgccaacgtccatctgcgcaagacgctggtggtactggtcttcaagcaacgtactggagaaccccgagtccatcgcagcggagaatgaagcagaagcatcgcggaagttcttgtcaaaggcgctgtagtccttcctgtacgcatcttcttggacctacaacaaaagagtgagtaattcgactcgatccgttcagcacgataaaagcttcagtctagcctgcatgcagcaccttgacgtccttcttgacgttgttgattcgccgcgccagactctgctctcgctcgctgttgacctcgtacaagatctcgatcggcctcagcacgtcttcctcgaggttcttggcgaactgctggtgctgcacgctcgtgttgaggtactgcgccctcaagctcgacagagcgttcttcatcgtgccgtgctccagctcgtccagacgcgagtaccgcgccatcttgctcagctcgtgggcgtacgtcctctccaggctgatgcggttcctcagcatcgtcaccaagttgccatgcgccgtcagaccagacgcgcagtcggcgcgaacgtcgtccaggttgaagagcagctcggtcgcgaaggaaaggctcgatgcagacccagcgtccgagtgcgagtgctcatcgtcacgagcgacactaacgcggagacctgcgccagcacgagttgctcgaggctggtctggggacgacatcgccggattctgaggctcttggcaagacccccgcaggacaataccaagtacctctctctctctacccgcgagtctttctgcttccttccttgcgggtcgatgagctagctacctggtcgaaggaaggcctttctcggagtgagtgagctcttcgagcaccagaatagacacgtttttgatttttgacagcaagagtgacggtacggcaacttctacgaccttcattccggaccggacgttacccgaccggtcacgcattgcgccatttcttgtattgtaatgcagaagtccaaggagtcgatacctctgcggagcttggacccttcatcgagcaagccgccgccgtcgcgaaggaataactcgctggagcctctaggagcgcgggcaggcgaaccggacattcagaaccaagacgtggcgccagcgagccatgcacgccggcgaatgtctgtagctataagccctggagctcatccaacggcgcacaagctcggggtcgtccctcaaaagtacgtcgttatagaggggagcgcgtccagtaagcgactgcacgcgcttcaagcgtccaatggctcctcttcaaatgtgcctggtaagagcgacttgaaccggaaggcggcaacgacgcatctacgtaagaaaacccacgctgtagtcagcagtatccacgataaccacgaagagagcgacagtgacagcagtgacgacggacatgcacaaggcgcagccgatgttagacatcgagcccaattcttcagctcgctcgtggggccaacagagtatcgggacggaggtatggtgacgaaagggaacgtcgatcaccgcggaattacaccgcacgtggtcttctcgactacgcagacgcccccgagcgaagcgcacaaccccatagtaacgtgcagccagcctgtcacgtgcgggttctgcaactctacgaacctcatgtgggtgctccgctgctcgttctgtggctctgcgcggatgagcgacgcaccccggctgaaatacctgattgacatgatcttgagcattgatccacggatcaaggcagacaaggttggtacattttgtagcagaagcagaggagttgtggttgcgtagcgtactaattggctctggttgaatagctagccaagcgaattctcgactatgccaagttcgatcgagtcgcgatgcgggtggaggcgaccttcaagcaagctggcctcgttcgcgccaaagctgcgatcatgatgatgaaccgcacggtgctgatgctccggtttcagatcatgcgaatgatcttcgtggcgtggaagaaggccaacgcgaatgctcatcggcaggacgccaacatccagcgtctgttattcatcaaggaatcacaagcaaaccacaaattgaagcaggacgtgttctcagtgtggagaggatacgtagcgcgagtgacagacgagagagtgcagcgttttcaactggcctgcaagaggtacgctcacttattgcttgctacaagttgaccatacataaattactgaacccagattgctcgcgcaggactgagatgacaaggttgcggcgaatttgggggagttggcggtcgttccttcaaattcgaagtaaagagaagcttcaggaactgcgtcgtcactatgaagaagagctgtaagttcaaacctccatgcgagatacatctgtgagctgagtagaagcctgataatcttgtgtgcgcgtgcttttatcagacaagatacaccgcacgaagcccagaaggtttggtttagaagcactctcttacatggttggactgctcttgtaactcttcacgtgtgtttttaggaaatcgatcgactcaaagaaatccagcaggaaatgctgaagatggtatacactgctggcgactccattctggagctgctccacgtttctcttcgaaaagccgatcacagcgttcaaagtaggctgatctctcacttaaaattttagctctcttgcactgtaacttactcactcccctcttgtcctcttcagaaacgctgcagcttattcaaatgtaccccaccacagcgggcgcgttcttcgaaggtgctcatggtcatgagctgctcgatgcgttgagcagcgggcatgcaatgcctcaaatcgacggattcggtcttgacgacgagaaggacgacgaaacaatgaggaaactcttggataacacgatcgagaaaatcgataggtctccaccgtcagatagtctgattcaatggctgaatttccagcgccgacgaggggctgaaatggggcctgtgagcgatacgagtgacactaaagccatcgcggacacgaacaaaggagcgactggggacagaacaaccaccgcaccggaaaaaccatcgagtgccaaagccacgaagctccgattaaaggagaagaagaaggagctcaagcctatcaagttcttgcaagatttaagaaccgtcatcgccagtcctggcgtcatgctcaagctactgatacacacgtcggcggaagctcaggttgagtacgaccggatccgaagcacggaattatctaacacggctgcatctttagcagccgaaagctcgaccacagcaacaacgctctcaccttctgcacaagttcagctgaggtcatacttcaagattgtgccgaggatactgaacctcccgcccgacatcgttactcgcgacagcttcgtgttgaacgattttgattcactgtatgcctacgcagtgtacctgtatctcttccacccgaactacgtcgcgcccgggatggagctctctcctaggtatcacctcagctactcgttcctgaccccacagtggcagaaagtcaagacttctctgctagaaaacgagtgcgacccgttcgcgcagcagcagttctacattttcttgacaaaactgaagcgcatcaacctgcagttccttcggtttatcggcatctgcaagtctgtccggcatatcgcgagctggcacgaacgtgcagtcactcgagaggctttcaatgacttctccaggagggtactgggcaaagactctaacatttcggtggccttggagaaagaaacgttggcatcgtgggtctcgctaccaccgtcgaagctgttgtcactctgcgagagcgaggacgagttccgtaaaattgagcaggtgtacaaggataacgtgctggacttgatcaaaatcttccgcatctacggcagtgccgctggtgggaagggcattctggagcaggagttcttgaaggtgatgaccaaggccggcgtcaccaacaagaagaacatattgcggtctcacttgcagatgatctaccagcagtctcgccagtcaaacggaggggtcccgctggataattccaacccaggggaaagtttccttaccccagggctgcctcctggtgctgatggcgatgacgatccggaggatcgaggcgcaacccccaacgagttcttcgaagcgcttacccgtgtggcacaccacaactaccaaaaacgccgtgaattcatgggccagatcgctacgatgatgaatatgggcgacgaggttgcggccgagactgtgagcggggcgggatccctcctcacgtgtgtcgttgatcttgtagtcgacaaggtcgtgccattgacgaagaagttccaggagcaaggactgaccttcaagaagcaaatgatccacccggacgtgcagcatgtctgcaaggcccaagagagaaagctcaagcggattttcaacacgtactcgcagaggaacaagaaccctcagtctcgtgggaagctgctggatctgagcgactttgagagtttgctgaaggatcgacggctcattgacgcgctcttcccgcacggcaaaatcaagcagcttgttgcgttcgtgcagcaagacggggatgtcaacaccgcctcgagcatcaatgggtacgatgccgacagcgagtttgtcttctccgagttcgtcgaggcgctgtcggctatcgcagtttaccgcaatgccaacccttatctaccgttttcaaagaagctggaaaccttcttcgaggagtacttctaagctggacttgcaatgccgattttcaattcaattattttgcagatgctcgcgagggtaccgaaaataaataggcgaaagtcattttcacatcaacaaaccattccgcaaagttaatttcattcgcatcaatctttcgccttttactaaagattgccgtggaattgacttactaaatgcggcttcaaccaaatttctggatccctccttgtgaggggaaccccctaattattttacaacctagctattaccttgctgcccttacatagtagtatgattattacgagcatgtttcaacgtctcgtcaccagggcttggtagtaattcgcgaggccagtagaatatagtactatagtactattacttctactatagtaacccgtaacttggcactttctgattgtactgtcgctatagtaaccagtaactcatccacgcccccaataatactatcgagttactgctgaggttcacctgaggttcacaacttgaaatgacacatacgttcgctcgcgaacccctcgcctgctgagtctatcccagagcccaaagctccactcgggtttaatcgcggtgagtaaatggtgagtgttgattgcaatagtttagcaccgccgctggtacgcaagttgctgctcagcataatagggaaaaaatgtcgtaagcccctgtgctcgttcgacggcggtaagaagtattgccgtttgcagatattttggccaacgcatgcttattatctcgttaataatctcgattttagtctagcaagctcttaattgagacctaggtctgatttatacatctcgccagtacaggtctaagatgcaaggttggggtctgtttcacgctttgctacgacttggaaacgcagaaatgccattctagacgggccaaaccgagttgctaggcctaaaagcgacccccaacaaagcataaagctaaatcatccctcgcctatctcgtgtccactcatattaagagacaggcgtggtctattttagagggcaacgtatttgcaagcggcaatactgggtctacatattttggtgtcgtttgtcgttggtacatcgcgagattttgtatctactacttctttccctgaaataacgccaaataacattttatttcagccaatcatatgcgagatcagccaaaaataatattgaccactaagcatcgaggaatcctgaatgggagatccggctctcagtcgtagaaattggtcggaaatggagggcggtgacggtccaccgaagggcaagtgccctacgtgccctaagctcgtggcgaagtcgaacatggccaagcaccgcaagtgtgcttccatcgcgccgatttgaaagtgaacacgtggcgagaagccgaccaggtcgtactttattgtacacacacatcgtaccttttggtatgaagtcgtatgttttagtatgaactcgtacattttcgtatgaactcgtactgttcggtattaactcgtatattctggtatgaactcgtactttttggtatgaccccacttcaaaattcaccatagtcctcagaaaaaaatcaaatctaaaattctccagaaaatttgtcgactaccttttcttacccaaggtggtcgatcattggccaattaacacagaataactgccaaatgttgtttcagcaaaaagaagttgcttccgatgacgagcccatacaaagtcctaatacagagattcgacttcctcggaccgaaacaacgtctcaaggcggccgaaaatcattttatagggttcgggcaatttccatacaaacttcttgatagtgactacgaggggctactattgaggtgttatttcagtcagagtaagctctacttacaacgcacgtccgtttgcgaccagatgttctcacatgtcaaagtcacacccttaaataatatataatatttaaacaatttgaccatttcgtgacaacctgccgaaaatatacttaaaactaagtgtgtggaccacattcagccagtagtttgatagtactatagtacgattactatagtagctaggaacgcttgagcaaaaggacccagtaactagtaactcgtttccttttactggaatactactggtagtagttcaggagaactaccgcttgctcgccacgttacaacactttattaggacatgcggcaccacttgaacgaaagggccaatagtggagcgattcccgcaggctttagattccaaaactgaactcagacgtgcgaagaaagagcaggaataaatcttggcacctgacagatctggaagagggggtaccccctctttcagattttgagctggcataaaaaagattcaaaacgctgcgggagttgctccagtgtattctattttgtattttgtcaacaaccttaccattagacggccagaattagcttttcggccgacagttatggtcagcattgtttttgttgtgagcggacataacatttgggcaaaatggtttagctgtttgagcaaaacagttcagaaatgatttccgcaaagttaatttcattcgcatcgatctttcgccttttactaaagtgcgccgtggaactaactcataaaatgtggatccctcctagtgaggggaactctcctccttttttttcaaagtattctacttgctcttcatgtatcacactatcattattaatacgtgctagaccaacattgtatgtgcattgctaccaaccttagcactgagccgacagcccaacttctacaatccgacagtcgatcaccgtctcggggtgcaagacaagacccggagccaacagcgattcgacttctcctccgtcttcgaaacttcctggccagaacgagcttgacttccgcttggtctgcaaccaacccagctctttccaagccgatgctactaggctggagcagaagtatttccgcttggatttggacgcatcggaaatatcggtcaccggagatgatggcgatgagctcgtactgctgccagtgttggcgaaggagtcttcactttcgtccgcgcagctacggatcgagctgaagacgcttctttctgattcaccagtggagcggaggatgccgaagatgctgtagggatttccatcaacccgatgcacgaaatccttcagcatcgcaattaactccggagaacgctccgtttgaacgcggcggacgacgatcgagttggatacttcgcgagcataggccatcagacgcggcttcaaagagtacacctgaataccctcggacgtagcctccataatgcgcagcaagaaccatgactcgcccggaacaacgatacctacgtggtcatacttggatcccgtaaactgcacgtaaaccattgttagctctatcagattgagtgataaacctggtaagctttacgcaccttgcgttgcagtcggctcgctccgaatcgacaggaaaacaaaatgatgtcgccacaagcaacgctattgtgtaatgaggttacgtggatcacactcttctcactccggctgagttcaggatcacgcgaaactgacacaacgcccaggaatgacaacagcagcacgtcggtgctggctatggggtgaacgagcaattgcttcaggaacgactccagttgctccttgcgatagtcgatgaactcgccttccaatggggtgaacacgtgcttcggtggcaagccaggtacatcaatatcaggatacttgctcttcaggtggctatgcagcgtgtcgaactccttataccgccgcgcgagctgccatgtcgtgccgttgaaaacgatgtcgatcaagtagcaagtatacggacgttgcgataggtcactgatcttggtcttggtcccaacgatggacaaatccagggtgggctgcggcatcttgttcaaaggcagcaacgcgagctcgatcttacgacttgcgcatccgagaatgtaatggccaattgattgttgctcgtccttcagccattggtcgccgatatccagataaaggatgaaagtgtccgcttcacgctgcaaaatgttctgcaaaagccctgtcgtcgacgtcttgccctcattggcaggccggcgcagctccgcttgcaactgcttaatggcgtccagcttgacctggcggacagtcacactgtcctgagaagcctcgctgaccggcacaatcgtcgacacgctgatgacaaggacaaggtgtagtcgtcaactacggcttttaaacaccagcaccaaaagcaccaacctgtcgcccctatcgcccgtcgccgtgacccgtaggatcaggagcgacacgggacttctcgtcgtttccgcctgccttacactggactatttaattcgagtagcaacaacacagcagatagatatccatcagcctctctccgtctctccacccaccacctgcttcacttgccactgacctgcacggccgtggggcgcgggcgctgcgacagcaactgcgccgaccgcagcgcgctctcctcggaccacgacgtcggcggactcgacacgcggctctccccctcctcctcttcactgtcctccgacccactcgacgcgaacctcaagaacactatcaccaagcaacatcacaccaaacacgtcagcctccagcactacacagtaacctactagaagttagtataagtaccatctcgatcggcctggagctcctgcgtctcgtgcgtggcctggagcttcgtggcgagcagcagacagtgcagccactcgtccctctgttccaccgtggccgtggcgaactgcagcgccggctgctgcttcgtgtgcacgctgaacttgaacctggcgtcctccgtctggccgctgccgctgctgctgctgccgctgtagctgccgcgacgcacggcgacagcggcgtcttccttctgcacgcgcgtgatgtccttgaccagacacaggtccatccagagcttgagcgagccgcgacgcttgcggcggggcgcgcctacgtccgcgtccgggtccacgaccagcgcgtggctgaagagcagcagcttgatgcgcagccagccgccgtactgcgcgctgaactggaacagctcgccgcggtggaggcactcgggggcgtccatgacggtgacgaggagctctttgggagtgagagagtcacttgaagtttgtatgtgagactagtgaataagaccgcgatgcgatttagaatggcatttttttagtgagcttgattttttctattagaaatcagtcacgtcctgcaggtttctctgcgtgaagaaggcggcgcgagcattggcggacgttttggccttcttggcaggcttggcgaggaaggacgtgatggactgcgtgccggtgggggcattggcctgcgtgcgaaaaaaaataagaaaatatttagagcgatgcttttcagaagttgaagagacttccagcccccacttaccttctcgagctccttgtcgtggggccactcgaccttcacggccttctcgaagaacggctcgaccgtgccccagctgaagcggatgatattcgggaacacgaacacttggtccatgtgggtcgtcagccacgccttcgtcctgcaacaaggtcaacacacaaacacgcgcatcagcaacaatatctccatcgatgcaccccacacccagcacaacatacttggggtcactagggtagccggagccgaagtctgtcgggaagtcgagcgctggactctcccacttccagtcgctgatcacgcggtcgcgcgtcaccttggccgcgatactcgccgcactcaccacctgcacgcaataacaaaaaattcagcaaaacacaacatatatatgcatcaatctaccactaccgcacacaccttgaacagactgtcggccttcttctcgacgcggaactcgatggtcccgttgaagtgcttggtcaggaagctctggtaccagcgcgggtcgcccaccgtgtccacgaacaccttcttcacgaccgcccccttcttctgcacctcgttgatcagctgaatggccgcgtcacgcgacatctcgttcaggttgctggtctggcgctgcatcttgtccgagatctcggcggcggagatcaaccgcacgatccacctgcccaatacacacaccgcgccaccttcagtaatcagcactatacaaactgccagtgcattgaactactagtcacgcacccgaggccctcggtggattgcatcttctcgaacaactgcgcgcgactctcagcgctcaaagctttcgagtcgtcgaaccccaaggcggacatggcgtcgttgtcggccaccggccagtacgccgccccatacaccatgggacccatgacgggaccgcgaccagcctcatcgatacctagcataacgggaaccccatccaagcagctcgacgggcagtcgctgccaagcagcacggtgctctgcaggttctgccgagccatcttttcgttggtgcgcggttaaatttttttatggatgtgattggatgaaacgtttgaccaattggtgagcgatgtagaaaaggcaacaacaacgtgttgccttttacgagaggtggagctcgccatgtcattttctggtggtggtgtaactttatacatattcgagcgatgctcgacgagcatcatgaccaaaccagtctcgtttacagtgtaccggccactgctgacagaccaaagagactcgaaaatacgcgtgcatttggcttggtttggactggcaaggtgacttctccgcgagctcaacccaagtgatgcacgcagccagcagcagtggcagcaccgttgtacgtgtgcatacttaagctccagattttttagaggctcatcgtgatgatcacttcgttcctgggcgtcaacgcagccaaagccacaggcttgccgttcccgagtcctttcccgatccgcagtgtttcaagtcaatttttgaggcttgcaggcatgcttgaaggggagcagttcgggtggatcggaatattttgacgtgagctggggggaccagtaccagctgggcctgcaaggggccacgcagaggcaatgcttgaagagggagacatagctcttcggccgcgccggatggagtgagaaggggaaagtcggcaagtgtaatttttgatcacggagagatgccatgctgccttcatcatgcagctttttggcggccacatgcgtcgcggtgttggtgccctgtacgtccagcgtggcggaaacggaaactcggtgtgtttttggcgagtttgggcgaagctcgtaacgaaacgggttcgccaccacaaacgtgaacctaggagcattggcaaattacgtggaaggtaatcgcgtgtagcgcgggagtaacaacagcttcgtgtggagttcgaccctcgccgacttcaactgaagctgacgggggttgtacgtctcctcatggcgaaaaaatacccgtcgtcgttcaggtcatcgctgggatagagaggccaccgtcggccgtcggcgacggacagcggctggcgctgcttgttgatgcagcgccctcgctctgtgagggggttgcgccggccggtgttggtttgcttgaggcaggcccggcaagtggcctcctctcactatggaaaatattacgagcatccggcgcggatgcggagccccccgcacccagcaggggcgggcacggcacagccgatgcgctgcatctcttcagcccagcttcggtggcaagcacttccggcttaacagatttgtcggcgcggggatgaactccgcaggagcttctgccccgcgctggggataccgcctcaaaaattgccgcagcggagctcctggtggggattttcccgtcgggttgcacgcgtccacgtagcaaactgcaacatacaacgttacgatgttgcttttccgccaatccggcggcgtcatgacccttcgccctccaatcacatcgaatatataaccccaaccccaaatacggaatggttcagagaccaggggggtggaataggcgctccgggtagtaatggcgatccgtttgctgccctcttaccggtctcggcactgcgcacgagccagcgcccgctgctcgacgcgcgccatggcccccaccattcgtgaaaacttcgagcgacggacaggtccgtgagccgagtacaacaggcaagcgcagcaagcagcagcaatgccgaacaacaaaatgtcaagctcggccatcgcgcgccgcatgcggccgatccgcgcgacgcccgaggcgctggcggcgcaggcgcagcagcacgtgccgcagctcgtggtgcgccccaccaaccgcggcggcgagacgctgcaggtggccatgggcggcaccgccatcgagcgctccatggtcaacgtgggctccatcgccgtgtaccacgtcaagcccgtggtgtccaccgacaagctgcacggcaagaagtccaccatctttgccgtgcacgtgcagaacgccatcaccggccgcagctgggtcgtgcaccgccgctactcggacttcatgatgctgcgcggcctcgtggccgagcacttcaagctcttcggcgacgagttcccgcgcatctcgagcctcgcggacgagctctacttccccaagaagcacaagttccgccacaatatgggcaaggtggtcgagcaccgctgcgacgcctttctcgagtacctcatggggctgcaccgcctgctcatctgccagaactacctgacgcgccgcgacatcagccccattgggctctccatcctgcgcggattcctgggcagcgccatcgtgcaggacccgagccacaaggcctacacgttccacaaacccatcctgccgatcgagctcaacccggccgaccgcacgccgatcaaccagtgcggatccctgacgacggtgctggaggacgacgccgagtacgaagtggaggtggaagaggccgccgagcccgagccggaagccgacgtggtctcgcgtgacggatctgatggcgactcgctctcggaggacttaagcgacggcgaggacacggaggaggaaatgatgcgcatttctgagatcgtcgaccgacgacgctcgcacaagtacgcgcgcaaccgccgcgtgctgctcttcctgcgcaaggacggcgtgtcgaacgagcccgagtctcccacctctgccgactctgaggactgccctccgtgcacccctcgtccaggcaaccgcatccacactgataagatgtacgtgcgcgcctccgagatgctgcgaccgtccgagatggtcgccgtgcgcatgtcggagatgcctgccaaggccatctcggcataaatggcctagactttcaccacttgcgtgcttttgccgccaacatttgacggtgcagtcgtcaccaagcagtcagcaatggaactgacctgcgagatggttcaaagtatgcgccaatatgtacagcagctatctcaagatgcaagacacgacttcagtggcagcctcgacaccaccgactgggggtggtacagctgcgcgaggacgcgaaccgaagcgcctcgacgcacaacaaacccatagcaacgacggctcccatgcgtttagactatcaatatttaatatgagttacctgtccttcactgagtctccgttatcatagccctgcttctaatttgcacatccatccgtgtccttttgacatgttcgtcgacccttaaattatttagtgtctgctttaccggtctgcttcatagaatgccgggtacttaacgatcaaggaggaacagtgtatcctacaaagctatccatagggtctattcaaataggcttagcgtttcttttcctatcgctgcttatgtgattgatttcagcttctcgtatgtagagttgatgatgccccacgacagtagtgaccggaagaagttcatttgcacgccacgatacaaccgcctcacgctgtggccgcgctcagcataggtgagctgcaaggcttcaagcgggccgatgaacggctgaccatacacactctgcatacgtgtccgtgccactacaatgtaaaccacaatgtcagcaaaactcagacccagcatccaacaaccacacacactatagctcaccgttgatcgggaaagtaaacgtgctgatgacagcgcccagcatggcgccgcagatgaagtcgttggtcatcgtcgcagcggccgtgtctcctcgcgggaagagatctctaagcggtcctctcaacccgaaaaataaaatatttccgggtccgttgcgacacaaaatcgccgtcagacctcggtagtgctctttcagcccgtacttgttgacgtggactatggcatcgtacgcccccgcgatctcccgattgaacttgggcgtctgcaacagcgtctgggctctctgtagaatgcaacaaacaaattttagacaatcttgaaacacaccaaccaacatcacgccccatattactgttgcgcacctcgaacggtgctaaaacggcctcggacgtgcctgccatgcccgcagccacgaggttcaagcctttgatctctccgaaatggctggtcagcaactcgtcgtagaagttgtagagcccgaacatgatggacttggacaccatggcctgcagcagcgggggctttacgcctcggtagagcatcatccagccctcgctgcgcacgttctcaaaggcctgccacgtgtttaagccgaataactgcagcgcacgacacacggttcgtttaggctagtgttttaaatggcaactagtgtaagctagtgttaaccggttagagaataatttgcctacctgttgccggaacatgaccttgttgggtgggaaggtgacgacaatgttgatggcagccgccgtgccgccgcagaagaactcgcgcaggtgcggaaaccgcacaaagaagtcggactgctgccgctgctgcgcggcctgggcgcgctcgtccgccgctgcgtcgctcaggaagctctccatcgtctctgcggcggcggcggggcacgcgctctgcctcgaggaatgtgaagtggggcccaggtcagacgtccacgaaagggtacactgtaccggtcatcaacctgttaaagggcaactgcaactgccaacgtttcacgtgatgatcccttccagtctgaccgtggcgtctaagctcgcaggacggaagcgttatcatagtactgtactaccatactcatggcattctacgcagtgctctcctcctatcaacgctgtagcggcagctatagcagcagctacagcgttgataggaggaatgcactgtagaatgccatgagtcattgcagaggtagctgtagaggtcgcaggagtcccggctcatttttcggtccggagcctactgcactacaattgagcacgtaccaaaacatgcagcaatagaaatcggccgtctcggcgcgtgcatactttgcgttgcttccgttgctttcaactttgtgcgcgtagcagtcgtttccatcgtcggtggtgcagaatacttcacaacggctgcacgggaatttccgtgtaggttatggcgccatggaatttctcctggcgacccacgactacgtctgcatcaattgcagtcgccttgttatcggctcgagactgcccataggtgcttacagtaaaaactctcaacttctacccactcaactacatatcatttttaggctaattactcaaccctagagttcaaaacttcgctaaacgtccaaaccaatatcatctattccaattcacgtcttttaacaggtttccacctccaaactcaacgcactgcactccctctccgttccacccagccaatcaccgcgcgcgactaagagccctcggttcgcgccaatgaaaaaaccgcgccaacggcccccgccagttgccaatcttccaccactgcccccacgtctgaccatggcgctgggcgtgaaggagagcgtgagcgggcggctgttccggctgtcggcggacggcgccgaggagcgcgtgtgcggcggcaagggcgccgtgtacctgagcgggcccaaggtggtgctgcgctgctgcggcaagacgagcatcgtggccacgcgcgccaccaagcagagcatcctgcgccagggcgacgtgctgctgctgggcctgcgcgacgccttctacgccaacggcacgctcaccaagtacgaggtcgtggacacggacgcggcgccgcccaagctggcgctgcacgtgctgcccacgcgcgtgccgagcatcaccatgagctcggcggcctccagcgctaccaaagccagcagtagcagtagagccaatagagcggcggctgcgcctcgcctggtgtcgtcgttctttgccaggaagagcgtgaataatcccagtcctaagaaggagaagaaggagagagtggagaagaaggcggaggtggaggacgtcacggcctccagcacggcagaagacgcagaagaggaggaggaggaagaagagatggcgccggccagtagaagacgcggcaagcgcacaagggccattgtggagtcggacgacgaggctgacgccagtagcaagatccaggacttgacggtggactcggacgtctcgtcgccccgagaggaggacgatatcttcgagaaggagctggagacgtccacgtctgctgccaaggactggatggcggcctttggacggaaagttgtgaagaagcacaagacggagaagaacagttcttcttcttcttcttcttcttcttctgtggggtctgacggatggaggagcaaaagggaggataagaagcagaagcagaagaaaaagaaggcggaggagagcagcagcagctccaggaggttcacgtacgagcatggaaatgacgacgacgactcggatgaagacgagcattactctcggtcccatgacgaggtcggccaactgctggaagagtgcgaagagatcgcgcgcaagctgcgcaggtcggtgcagaaatggtcgggcaactcgaccaagtcggcgccctccagcccctccacgtcgcccgcagacgctacggacgaagaggagtctgcccacatgtccatcgcttctatcgacggcggtgatcgccgcgtggtgacgcaggcggatatcccggacatctgcgagacgctcgaactgaagccgtaccaggtcgtcggcgttaactggctgctgctattgcacgaaaacaaggtgtcgggcgtgttggccgatgaaatgggactgggtaagacggtgcagacgatctcgttcctgttacttctcaagtcgctggagaaatcggataaaactgcggtcggaccgcacctcgttgttgtgcccgccagtgtgttgaataactggacgcgcgaactgtcgtggattgcgcccaagatgcgtgttgtcacgtaccatggatcgaaggaccaccgccgcgatttggaggaaacgctggatagcgacgattttgacgtgttgctgactacgtacgcttactttgagcgggatacatgccaggaggagcgcgcgttcctgcgcagcttccagtttggctacatgattttggatgagggccacagcattaagaactcgaatacctcgcgattcaagcgcattaccgcgttgcgtgcgcgtacgcggttggtgctgagcggtaccccgatccaaaacaagctgaatgagctgctgacgatgctcagcttcttgatgccgcggatgtttgatcacggttcagatgagctgctgagcttctttgatggtaacgagcagaagaagtgtgaaaaggtccggaagattttggcgcctttcatccttcggcgagagaagaagtacgtgctgagtcagctggtgcccaagactgtccatgttgagcttatcaaggtgggcgacgagcagcgcaaggcatacacgggcttgcttgaatccgtcgttaagcgccgagacgcccaagcagcgatgaaggcagcagcgaaggagcgcaagaaaaacaagggaaaagagcacaaagccgaccgacggttgcgcgagttgatgggcagctacgctacgccacccggaggcgaacccagcgccatgtcgatcttcacgcagttgcgtaaagctgcaaaccacccggtgttgctccgccgccatttcgtgtcggatgaggtgctggagaccatgagcaggtgcttgcaccgggctgaggcgttcggcaaccagtgctcaatgagccgagtccgtcaggagcttgagtcgtacagcgactttgaactgcatgatctgtgtgtgcagtacgaagccatcgatgagctccgcaagttgcagttgtccatggataccctgctggcgtctgccaagttcgattacttgcggaaactacttcccaagctccaaggagagggccaccgtgtcctaattttctcgcagtggaccaaacttctggatttgatggaggtgctcatgagccacatggattatcggtatctgaggttggatggctccaccgacgtgcaggaacgacaagggctcatcgatacgtataacgaggacaaaggcatctttgtcttcttgttgtcgacgcgtgctggcgggctcggaattaacttgacagcagcagacacagtcattctgcacgacttggatttcaacccgacctcggacgaacaggcctgcgatcgttgccaccgcattggacagacgaagcctgtgtccatttacaagctcgtgtccgagaatacggtggaccacgacatctacaagctgggcgagtctaagacggaactcaaccacaaaattctggacaagctcaatgcgcacggtgatggcgctaagaagaagggcaaaaagtctgatgcagtcacagtggaaatgttgcttgcctcagttatctcggattacaagagcgcccaggtagaagtcgaagaagagtgagtggaaagcagaatcgccacaggagccaaaaacaatagagtggagattgactgcatgtaatattacttagacgcacttgatatgatgacactgcgcttgctttaatgatttcattctatggcgttcgactgacgcggtgatgcttgaggtcagcccttcttggatgtgtccttgtgctttggcagtatggagagaccgctccctcctttgctgctaaactgtagattggcaaacaaaagcgacgtgagcgaggttgagggagcaaggagcagagctgtttgctgctgtcataccgtgcgactggaagttttcgagttgctggcacttggcacaaactacaaacagacacccggcgttagctgttgagtgccagtgttgttatggtagggaacttgcaaggaatacgtaagatgctgttgctctcgcgtcgagcaatctcctcctccgtttcttcggtcagaggagggaaaagcggggagtcgtggagggctatagccaaatcctcaccgaatgcatcgtcgaaatcctcctcgtcgtcatcatagccgtcagatgcccccagtcggagactgagtagctctgtcgtctgccggatctgccccaccatcgtcgtaatatcagccaacgctgctggaatcaagtccaaagtcagctccgttcgactgagcttccgcgagatcgagtcgatggttcgacgacccccgtttggcaagtccacagttcgtcgaggaccatcgagcgtccttcgaggacctggaggcaagtccagtgttcgtcgaggtccaggtggcgagttgctggttagactctggccgagtggtaagtcaatcgtgcgacgagacagattagtggttcgcgcagtgttcgctggtgcggttcgaggtggctgggtcgattgtcttgataacccggaacttttgctggttgagcttggtgtagggcgcttcgacagcagactttttgcactggatccgctgatgagtccggaatactgtgccaagtcccgagtgctgtctgttgcgaacactggttcgatgaacgagcgctgcgagtcttcccgagttgaagggcgaacacgagcttgacgcggaacaagagcacgagacattcgacgcacgggcttcgatgcgcggtcggcaatgtctttgagtttatctcccagcttcttggcgcggtatatggtgcggagcgacacggacatccgccgctgcttgagcgacttctctacgaccatcgtgagctgattgtgcacctttgctttctccgtgggtgacgtgatgttcatgttgtcaagctgccgtttgatcaccgttctcttcattctttctccgaattctggatactctgcggcgatctcgttgaacgcatgcttactgagcacgttcaagtcgcagatattgacggcgcgcacagtgttcgtacgtcgtacgtcgatgacaagtgccgtctcaccgaagaaattcccgtctcgcaagtaaattcgcttgtccgaatccccgcagtcgggaatcaagatctcgacgaggcccttacggacgatgaacatctccttgccgatgtcgtcgcaatagatgatggtgtcacctggcaagtacacagcggtttccagtgctaggcaaaccttacccaagaaccgcgagtcggagccagcgaagaacgggacggtgttcaccaaatccttgtacagatgaagcgcgatggtcgtcttgagcggcctggagataccaggctggttcaggagcatcatgtcggaatacgcgcgttgctgttgccaaatgcaagcgtgagtgagtacatatccaaaaacacgagcttctgaaggctaatggggaggtgtgttcctaagagagaaggggtcgaacaacttacgttgatccagaggtagtcgtagtttctgcgaacgcggtgctgcagctcctccggcagctcgtagtatttcatctcagccttgatcatgtccatgcgattgcggaactgcgccttttgttgatcccagctcatcaacaaggcgaggacattcccaaagaggaaagacgaaaagactgtgccgagcatgaacaccgtgatgctcgtgtagtagagctcgatgttggcgctaacttcggggttgcgaagcttcgcgatgctcgagtatgtggtgctctcaccaatccctaaaaacataagcatgatgatgtggatacattgtacatacatcggtgccaactaagagagagaaatatgtcagccttctcgttggtatcaagaaattatgtcgtaacaaatacgtacatcctcttcgctgcaatatacttcaccttgttctccatagcattcattgaacaagctcgcccaaatgcacgcgaacagatgcagccccatggcgaggccgagaaagctgacaatgaggttgtagtacttggcgtactcgcggaggtacttcaggaggcgacctatccgtagcagtttggggatcttctggagttttacgatcttcaatgacttccccgacgatgagacgaataacaccaaagggaagttggagatgagatcaacgatgaaccacgagtggaagtacttgcgcgcgactttcttaggatccatcaccacctcgccatttgacacgatacccgtccgtagagtcatgaccatatctgtgagagcacaagaaaaacaatgagtgagtacattccgatgcggttatccccactcttcgacgccgacgaacctgtgatgaaatatacgtcaataaatgtgttcatgccgctgagtccactccagtcgataaactgaaatccgattatgaatggaatctgtatcaaacatacacagtattagcgtggcagaaggtttgaattgcataccgaagaaggacttaccattgcgcacacataaattaccagacacacagtcgtaacctcccaagctcggcgcaacttggagttcgggtggatcataaaccgactagtgttgagcttccgatcgtggtagatgtcgatcgagtgcgcgttcatcgacttggccagtactgccagcttgctcaccatcttccaactgcgatgtctgttctttttagtgaattcaatcgaccgcattgtatcgagtgctgcatcatcgttcggatgggctgctttgtcgttatctgcttcgttttccttgggttctggcgcctttaacatgatctgcgggagctcggggcctaaagctgtcgtcgggtctgctactgcgacttgtaaggcttcttgggggattatgggcgacgacagtttggccagtaggtcagcttcttgttgaggcgttgtcatctccgcttggccaccggatgcctcaatcggggcctcgttctcggccgtctcagtctctccctcaggcagaactcggctagacgcgctgatatcagcgcttggccccttggcgctccccatgttggacggactgcagaatacgctctcgactatttagcgcatttcaagcccccacatagccccaagttgaagcgggtcggtcgttttgctgccagaaataggctttcgcgtcttgtgcagttttacttggatcgaaacgaatgctacgaatagcgtcttgaacacatgaacgtccgtccattgtaatgtgctggcgatgctctgagggctactgcagtcgaaatgcaattctctattggttgtctgtctattaagttcctaacgcgtcgatctacagcacgcactcgaaccacttgacgggcttcttggccgagctaaagagcccgtcaccgttgtagaacgtcgtgtcggcgtggttgagtttcgtgacgtagaactgatcgagataatggtcaccgaactgctcgagcgggaatcctccggcgcagctctggaactccaccatgccgtcgttcttgcccgacttgtggggtagcccggcaccgagcaggcagtacatggcttggtagacggagaacagtcccgagtacccgttactgcacatgacagcatgaacgcgcgtatggtagacctcctgcgcggcctcgtactgggtgttgagctcggtcgagctgtgctcctcgtcctcataagccagtgacagggtagcccctagcacggggcattgacccgtgacattgcccagggcctccatcagcaccgtgtgctcgccagcgcaggactcctgggcgaaatcggagcccatacttcccgtcataggcggactggtggcgatccacgagctgctgttacccaggctgcacttgccgttggcgatggcgctggccagcatgaggccgcccatggagtgcgtgacgatgatggtgtccgtgatctcggtcggggggcccgtctcgaccagcgacgtcgcgaggttgcacaacgtttgctgctgagtctcattgttccatcccgtctccatggagttccagatcatgtacttgaaggcggtgcagcacggcgcgtggtcgctcaggttgccccagtagtagtcgaacgagtcctgcagctcctccttggcgtagtcgatgcccagaccgtggatgaacagacacggacgcggggtcgtgcggcacttgcacgtggccgagaccaggtcgacgtccgagccgaagtcgagactgcgggactcgctctcagggatcggctcgcccgtgagcagcgcggcggaggtggacgtcaccgccgtggcgttcaccaccttctcacactcgctcttggccttggcgctgagcttgggcgccgtaatcttcacgggcgcgtccaagtacttgacggtgatctccatgtcactgccgtaaacgtggacgccttcagctccggacgcgcacagcgccaggttcagtcctccgaacttgagcttgaacaggttcccggccgagcacttgatgcgcttgccgtccagagtcgcgttgtacacggacgtggcgtcgttgagcgcggggatcatcaggtcgaggtgcggcagcatgttggactccagacacttggaggtggaagaagtaccggagctgacgtcgcttcgggtttgggtctgagtctgggattggtcctcgtcggtcttggtttcggtcgtggtagtggcgtaggcgacgccgtccaccagcatgtagcgcgtgagcgtcgggccttcgttgaagtcggcgtatccgttgtacgtcacgctgagaccgtcgcgggacacgaccgggttggcgtacacgtcgaacgccgactcgccgtacacctgcatggagccgcgcttgagcgtgaagtggagcttcaaggacggccattccttggagctggtgcggaggtccccgtggacggttccttcgcccttgttcgagactgcggcgccggtagtcggggtcgtgaagacggcgactgcagtgcagaccagtgcaatgcatcggaggggactcaacgatgaccaccgcattctacgtaagcttattagtgacggggtaccgagttcttggtagattggtggcaaaatatataatgagcagcagctgtgagcggagagcgaagctgcccgtacggttcggcgatgggagggagacagagcctgctagcacagaataggcaagagaacaagcgtttttgtgtatgctcatgcacagaaccaaacagagggactctgtgcatggtagcagactctacaaataccaatcacaagaaaacagatgcaaagtgctgattcacaacatcgccaatgtcttggtggcgagtacagctgtcgacgtccgggcttctggacgtcgactggacgtcagcaacacctcgttatcgacgtcgccttgacgtcccttgacaccctaccaaattaagccatataattggccaaaaaggttgtttgaacgccaatcagaagctcgccatgtcttagctcgtccatgccacattcacgaagcaagctgtgcggatggacaagatctcaaatgccggagcgccgtccatttcctgcgtgagtgagcttcagatcaacgaccagtggtctgttgtcggctcatcctccaattcgccgcccagatcgaagtccatactcacgggcctgtgagcatggaagctcattccgatatgcgaggccacgtctggccggtggctagcccccctccaagaagctgcgcaacaccgtcgtcttcaagaagccgtccagcgtcgccttcaagaagccgcccagcgtcgtcgccaaagccacctcggaaaaaggcaagaaaaccaactccaacaaaaacctctccgcggagaccagcacgaagccgcccaactccatccaagacaactacaccaagaggagctctttcaaggacaagtaccccgtcgggaccaacgcgtgtaaggctgactgcgccatccgaaacccgcatgcaaaatgcagcccggttaaaccattcagctttcagcccaagctcacacgaacaacttcaacaggacccgaccgccaaaggcgtcacgagttgcccggctggaagggcatttgaggcccctaagcagcgggacaaggcgtactggcagttcgtcgtatgtgtggtagacgacaagtacaaagatattccaaggcaagacctcacccgcgaccacgccaagagcttttattgctttggatgcaaggaggagctttccatcaagaagggaaagagtttggttggcccccacatgcggaaatcccacatcgaggccttacgggctttcaaagaaaatgagcggcatgaagcagccctgaaagaatcgaaccaactggtgaacttgtttgaacgagaagatgaatcggaacagagcttcttcgagggcattttgtcggaatgggtgggtacggatttgcgacctacaagtatcatcggcgacagaggattcgcgaaggcgataaggtttgcaaacagcgcaaccactgttcttgagatcccgtcgagacaaacggtcgcgctccgtgtccacgaaaatgcttcagagcgccgtttgtcactgcgagtgatgctggtgagcgacgacgaatgtgacttctattcggcctcgtcggatatttggacttcgataaagtgtgaaagctttataagcttaacggttcactaccttgacagcctgttcaacatgaagtcgtggacacttgaagttacctctattcctggaaaacacgatggagaagacattgcagatgtactgttacgttgctttgcgtggtggcgtctggaccccaagaagtgtgttcgatttctacgagatgctgcgtcgaacatgaaacgtggatgcaccctccttgggctcaatcattgatcatgcgcagcgcactcacttcacctcgttgtagccgcggcgcttctgcagaaaggagatgaacgcaagaaggcgatagcagttactgatggtgccagcaccggtgttagtcctggcgaagttggcagtactctcggcaacgacgtctgtgtgcgcagtgagcagtatgtggaaacggaaacccagtggatagatgagcagctggatgccttggaaaatggcccggactcggacgacgacggtgaagacgaagagtttattagtgaagctgatattgatgcgctttgcggggaagttgccagttttgttgcagaagccgagaaatcagcggctatggaaattagctcggctgatatggagctggttagcaaaacggttcgaaggttccgaaagctggcggactacttccatcgctcacaaaaggctcgcaatcgactagatgagctgcagtctactcgaaaagagcccctaaaagtgttgatcgattgcccgacgagatggaacagcacaatggttatgctccagcgctgtttggatttgcagcctgcggtgaaagattttttcctgtacattaagtcggaagaaggcgagaaggagtttaacgatcgatctacaaaaaagttgaagattccaagtgccaagcagtggttcatgattcagtgcctggtcgagctgttggccccgttcagcgttgccaccactatgctcgatggagagacctatcctacgctgatatctcttcatcttttcatctcttcactcaaacgatcgctggacaaccaacaaatatttgatgttctctatacaagtgtcgagaaggaggcatacgcaatggaagtgctatccatcatgcaatccgtccgccgaagcttttcagccttgttgaagcagcggtttgataaggaggcagaccccgaccttttgtggatatcgttgcttgaccactacatgacgaattcggcgattttcactgcggatgaatatgagaaggcgcgggagcagtttgccgatgagatgttcgtgctaaagaagaagtctgctttggttcacaacgacgcagctcgttctcaaagccctgaaaagcgaatgactgatgctacagaccgcgctcgacagagcttcctaaagatgttgtacggatcgagaacgtcaagatcaccagctgcgacgcacgacaagttaaagactgactgcgagtgggagctaagcagctacttgaagcagtcgagcgaggcggaggtcaaagctcccgacaagcccccatcggctttgtcgtggtggaagcagaaccattcaaaatttccgactattgctgttcttgctcgcaagtggcttggatgcatcgctacatcggtgcccttagagcgcgcgttttccactgcaggtaacacagtaacaaaacgacgttgttcgctgaaggctagcacagttcgggatattgtgtttatggctcaaaatggagcagcatgatatgtatctagttagtgatgacaacactgtaactaacatgtataatgtttgtatgcgtcttcataacgaaacttcttcacgtatgtaactcatttcaatggtgcttctgcgatagtattgaatgaagatggtagagcgcttctgcaattttgggccacaccatcggatccagagacacacaagccgtgcacaagtccggcatcgattgaactaacctgatgaaaactaaacagcgccaccatctagatgatgaccacctcagagactttgtggtctgagtcaatatccccgcagccttttgcgtgtgaatacgaaatgacatgctgaccaacacgggcagtacgactccgaccaagaacatgtcgacgtacacacaccacctccagcgccatccaccgcgacatgccaacgccggccgtcatctcgtcgtcttctcgcttagctgtgagattggtctctaggctggaggcaagctggacgttatcgacttcaagtctcgatgcagtacttaagtctcaagcgagtggaggtacgtgagcacgtacgccgcgttccgagcgatcgtcaacttgctgatctcgaagcctgtggtgttttcacacacactcagcaacgcgcgtaagtcgccgccctccataatctccgagacggcgcataagtccgtcagtgagtcccaagccatgcccgcgaacgggacactgcgcgcgtgctcgagcgtcgccgtgagcttcacgtcagccaagagtgcgtccacgtgcttgacgctcttgcgcactttcagcagcagcatctagaccgaaacaagccgatggttgaacaggcatctctggagtcgtcgatggacttggcttccgactccatgagggagaatgggacctgtgaagttgttctcttcctcgcgctcagtgtcgtgagactggttagtctggccgactgtcggtcattgccgcacgtcgtacgggcctactcagaggaggggtcagctgagttgacgatcaacttggccacgttggcggctaggtatggcgtgtctgtcaccacgaagttgtagccttcctgcaagtcacgggaacacaacctagaggtgatgtgagttcgctgacaacgcatcaggccacaagacaagcggcacagcacacgaccaagagagttctgctatctgagactacctgtgtattatcggcgcgtaggcctaagggtagagaatccgatcccttagaaggtggcaatctagcgttcctgagcttgtagtcaactacggtagtcgagctaacatgccacataatagaatgcgagccaccaaatgcaatgaagcagcccccacaagtggcatctcactatttcgaaatagtgaccaagcgggtggtgtcaagggggcgttgatcagacgtccgttggcgacttttgacgtctgggtgttaaccttcgataacaccggacgtcgacagctctagtggcgagcgccaacaacatgggcatcttcactaagggggcggacactcgcgcgttggctcccgcctgcggacttagcgacggcacttcggggggcccgcccctctctcgcttcgctcggggagcgccgctgcgcggcctgccccaccccctcgtgtcttacgctaagtcctcggctcggccaggcgcggtgtctaggaaaaaaaaatatcgggttgcagcgctcgcgttcgctcgctcgcacagacacgcccccgcctaatcggcgggtgttggtggtcagtgaatgcactgagtgagcctcgcgctcgcgttcgctcgccctcgtccgtattcagcctcatgtagtttagtcatgctaatactttgtctaaacggttctgtaagggcaagtttacacgcaacgcttgcgcttactccctcttgcctccataattgctcaaatagtattgtggaaaccgattagattgtccgagcggattagctgataaagcagcgttcatgagggatttgactagtagtaatcgaggattcctatgatttcatatggcatcggtgagggtataaatcggtgtaaggttaataaaataggggttgcctcattaccgcctgcaatgcgaggaacgaccacttaccgccacgagctaatgtttcgcgcacctactaacgaggaatagcatcgcgtgcattaaatacgcttctgtgagcagtcgatatgtactgtactgctatctatttatcaagttgtgaagtcatgtatttgcgctgtcatttctcgtcagcattagcgtttgttggttttactttaaatcggccgccgagtgggtgccggacattcgggctgattagcatgcaaatcagccgtccaaggctttgtaagtcgtggagtagctaaatcagcttgccacatcgtgatgtaggcacaacagactgctctgtcaaatcagagtacaaatcttaggctgtcgatctaattaggaggtcggatttgctaaatccgacttgattatgcttaatcatctgcttaatcaaccgatttatactccaattagacaatataatcggtttccacaatacaaacaaacactcgttgatccatctacaagctagctatgctctactagtaccttttaagttaccgcaggcggcgtgcagcttggcgcaccagggaagcgaggtgttgggcgcggcgaacggcggaggccctgccgcggagcaatgaggggtaggcggcgttttcggaaatgagcaactcgagctactcggcctcgaaaatgatagacaggtgggatatgctagccatcctcggatgtgtttttggcgaacatagccatcctctcagttttgtgctagcagccattatcataaccggggtccggacgcggtctccgtcgtgcgcacgtataaccgttgttattgccctagccaccggtacaaataagacagttatctacccccgtgtcctcgtcacacccatgccctgcacagcttgcttacgtcctctcttgctctcaacgactccatcgagcggttcactccgcttccggttcgatccattcaaatccctggccaagaaccgtcttgccatcacagcaagttttgcgtggcagtcgcagcacgcttgctctgatcgatgccctggcgcaacactctcgagcaacgcttcacatccacacttcaggcaagtggacaacatgtcggatggcagcacatcgtcaatccagcagttctccgtgtaaaacctcggtaggtagactaatacactcagggacactctaatcccacaaatatatactgaatgatactctaataccgttcctgcctctccggccacgccaactcttggcgctgccaaggaaactctcggtcaatgcgcgataagctccccgacaggcatccacacgcagtcgagcgtgtccaggcactacaataagctagctacacttaccgaagtcggacttgacccttgttggctttgggcgaagactgtcttttttttactgagttttctgaggccctcggggtctcgttctggtcatcctatgatgagtcctatgttcctatacaaatatctaatgtcaacgatcgcaataaggcgattccggacacatcaaatggcgaccgcggctacactaataagtgcagccgaagtacgtaactaaatgcatctgtacctaaagtgggtaccatgaagcctcgttcggggttctattaggacccgacgaggcttcggccactgactgtcactctaccgaggaaaatgtcatcatctaatcagatcaacaggagcagcatggccgaggaatctctcatgcgtgtagcgttagatgagtctgtgcgccgcacctacgaaaaagcttctaacattcgccctcagaacacttcgagggcatatacaagcaagcaggacgagttcaagcggtggtgtgacaacaagggcgcggctttcagtgatctcactcggtacacagtaacagggccaaaacttcacctttttcttgtggagtgcgtgattgggagggaaaagcgacgaaagggtcacggagggagaagcgaaaaagttggtaaatcgactgtcaacagctatgtcgctgccatggttgacttgtggcggcaacagaaacgactgaatagcaacagcaacccgtctcctcgagatggcgctgttacagcacttctcaaaattactacgtacgaggaggaccagctgcggcgtaagaactttgcagatcgaggagctgatactttactggatggctacacaacaacggatcagctacaacagattgctcgctacttttggacctcgtcgcacgaccctggaactagcatgaggaatttgctggcgttcctgttgtctcactatgcgctaatgcgtggcgagtctgctcggctgatggagctagctgatcttcactcgattgtactggaaaatgaaggctacagtgtttgtcggggatggtcatgacacaagggaaaaccaaccaagttggtcgtattgaagtgggtgcatgtatgcgcagtaagaaactggagatttgtggtcatggattgctcggattctatctgtttcggcgatggcacgtggataaagagtcgtttcctgatttcacgaagtcggaacaatggtatcctataaaactgctaaaaactgggaaagatccaaccaagccaatgtcgtacaaggtttatcgggcggctattgttgacgcgctcgaccacatcggtctacgcagcagggccaaaacacatctaggcagaggatcgggctcccgaatggcagaccttgggggtgccagtgaagctcagatacggcgcctagggaggtggaatactcaggcgatggagaaatgttacctcacctcactcccgagagaagcaatgcgaacgcttgagggctttgaaccaggaagaggcagttattttctggcgcgtacttgcgtagatcctgcccaagctcttcagaaacgtatttttccgttggtggaggagtgacagtcgaagatgacttcaggtgaatgtgaacagtcaatcgcggctggtggttttctcgagctgcttcagtatctgcgcaccgtaattctgcaggatgctgccatttggtccgagcaaatgccgggacatccgatttggaacaatgagatcttcaagagcgatgattttaaacaatttcagctggaaatgaagaatgccatgaaccacgttagtgaccccaccaagcgtcagcttgagaaagccatgcccgcgctgaaatcgacgctcgatggtgttcgacaggagatgagaacatcattgagtggtattcgaaatagcctggacgcggttggtgaaagtgtagcagatgtcatggaagttcttgccccactcaggaatggatcagcatttgtggaagttaagatcgtgaatggcttacaatcgacaacccccagcgccacccaagccggatccggagctagcacaggtagcagtacaccgagcgacccctctgcgattaccagttacagactcagccgggggcattcaatcggttcgtgagttgtggaccgaatggacatgtggcctccctggtggttatgtagttgaaacgctggagcaacagctcggtaccaagtggtgtgaccatcacgagagacgcttcttcaaccgacgacgaaaaattgttgatcttgtaaagacggtcgctagctgagtttgcaaccacgaggcgttcgacaagtatcaggcagtcgaagaggcgattaagcgtgttgacagcatccgctgtattcgcaaaaaatcgctcaattgggtgtctcaaaacgtagctgcaattgcacatgagctcggagtacgagaccaggacgtttaacatcaagcacaaccgcggtcatacgcgataactgcgcgcttcagataaattacagcggtaaatacaactctcaacattgtgactttgcggtaggtgccgcagtgtaactaccgcagtgtgagatcgcggtagctaccacagtgtgacttcgcggtagctaccgcagtgtgagatcgcggtaggtgggtgccgcagtgtggctacctaagtgtgacttcgcggttgagctgccgtttaggcgaggtggtagttattgaggcaaaagagctgtgatgaggatcacatgcgaggtctcgattgatgcaaattacgtatattgtttttaaacatgttacttaccctgttgaggcccacgtgcgactctgctgtggagcttggagcggtaagaagcagcttttgtagcgttaaagtctgtcgatatccattcacccaatttgtcctcaatggattgtggttcggctacgtgcttcgagattacatccatgtaatgaagcaggtataaccacaatccacactgtttgattgctgtggctttgtgttgaaggcaaaagtcttccattcaaatgcgtcaaattccttttcgtgaaggttagacagaaaccacttggtgacatcgaaggcgtaggcggaactatgagcccttcgcagcgagttgatatgatacaccttcggcggcgcggattttcaattacgaggaggctccaatgcttgcggccggatacgggaactagcatgtagcgataacgtttccagtcgaattgctcaatcagatttttgagcaagcggcgttttttttttgcggtttcagtgtatatcgggccacctccatcgacaagtagagtgtggtcccgtaacaacagaccaacccatcttgcttgagtagtcaatggccatcgacgtcatgaaagaaagtggcagcaagctatccaagtcctcgcggtaaaaccggaagcttctcccgaaccctggcagtccacccaaacgagcagcgcatcatcgtgcgacttgcgctgcctcaaaacgcgacggttgggtacactgggggcggaggctggtcctttcgcgctcgtttcctcgtatacactaccgtcggaacagactgagctttctgattccgagctttgatatttgtcaccctcgaatccctcctcgtaatgtgcactctttccgttcgcattatcgctatcgtcctcgtcatgcacgctatcactgtccacatcttctctatcactcgagttttcatccacgtgttcattgctcccattgccacaagcacttgcgtcatcatggttctcattgttcacttcgtcactagcacttgcttcgttatggcactcattgtccacattgccgctactcctctcctcctcagcactggccatatgttcattggcttcaccactaatgcgtgtaccaacttcactagccgcatccccaataacaccactaaccaatcgggtaccacgagctccgttgaatttgttcacaattcgaacttgaccgacggcagtatcgaggtcttgttcgtgctcaataactcgtagtcgtttccgtgcaaaatcgcccgtatgcggagttgcctcgattgcggtagcctctccacatgtaggtacgtcgtcttggctacacgcactacactcaaccgatgccgatgtgggtacagtagccagccagtaacagtgattcaggtgaacagtactgacagcacgatacttctcacgttcttgatacgtagtcttcaatttggggtctgagtgcatggcgttacgaacgtaactgcagagcgcttgatcggcgctacgaaccctcgtcacgctgtccgcaatggctgcgctcacctcagcatcggtgaacattttcatctgtgtcgtagcagaccgcacataagcagccacatcactagagataccgacgacccgctgtcgggctgatggagacagctctgacgcgatctgcgctcccatgcattccactatagccgctgcccggctcacaacgtcttcaatcgcgccccctctagtcgctcgagcgagtgcggtaacctcggcggcgagtacggcacgcaccagctcccctcggtacgtatccagcgctttatccacagtactgtcctggtcgttggagctattgctggcctgcactgccgccgaagcttcatgcacaacctccggcgtcgatacgtctgcacgcaccatccgagggtatcgcggacggtccttgcggccatccacgatgccttttgggtagtcttccagcgggaaggtgtcgtcagcgttgttgagaatgtacgtctgtcgacgcggcggttcttccgccagccacagcgagcgcaaagctcttcctgcgcgaattcgcaaccagccttgtgcggctttgttcactccaggtgcatcttgggcggcttgcttccgcgcaaaccgggcagcgctgtcagagatctcagcgccggcttcaccggcataagcccagaagcctctatggcatctcatcggagcttggtgcttgtgctgcagagcggatatgcggctttgacctctgttcagtccagatgcatgtgattggctaaaatacaactggctgttattacccccaggtcctcagctgggcccaatcacgtagagaccgggtcccggccggactcagtctgtggctgggttgataacccatcactatcatggacgggagggacgaaagaagggcggggattgtatggtcactgtcgaaacgtatgcagcgagctgcatgttgcggtcaatcgccgcatggcatcacaaagcccgacaatatgcgtcagacactgcggctcatttttggatttgccggagagcaagacacgtgaagaataaggtctcacgtcgtttctaacgttaactggtgacgtcccgccagcatgcttcacattttttttaatttctagccaactctacagtattgtagcaacctatccagggcggactaccaccacggtggctgctgaggcggttggcttggagatgaacagacctttgattccttcatgccagatgcacatgcacacatgtactcactgccatcactgttgatcattggccatcaccgttgccactttaccgccggttgaggccgatttcgacttgcaatcgctcaatcgttgaaacgattcggttgccaatggcaccaagcggagatttgcatctaagaaccctgtgctgcgccagtgcgagcgtgcacttttcttgcctgtggacgaacatggccggccaaagcgttgctgttggctttgaaagcaagcagagatgacccgggactccggcggtcgctgaagggtctttcggttgtggttgcgggcacgccaggccgttgcgctgtctgcaagttgcattctggcggtagccggttgttgaacatcatgttcaaccgacacaagcgatggacttcgcttccgagctctctctctactaccggctggagtccgtccagcctggacgacattccttcgaggaggagttgggggactgcactgccgctctttgcattggacgccagggttttaacacttcggtggccctgctgcagcgcgaggaaaaacgagctggcggcaaagaaacctcatcgaaaaaaatggcgtgtcgcgagatttcgcgatgacaattgacaatcactctggccaaaagttgccttttactgagccgaactgaactctagtaacttaaatgagtagactaacttcaaggttgcccacgccctcgctcgaggtctcaagacgccgtcaacttttcaccttgccagaaagacctgaagatgccgtcgtcgacgctgtagtgtagattcaacgagagggtaggcgggccttgtacattggcaaggggaccagtccttgtacgaataccaagtattgaagctattatacggtgcttcactctgcaatcaccataccattcagccgcaggagctcgaacgcgagagtaatagctccaacttaatccgcgttgagagactgctaacgtattttgacgcatttgctcgtgataagttgatctgtccccgatggatctgtctgcacgtcatcgcgtcaaacgagggtcttcactacccctctgacggatgctctgcgacttaagttattccaccaggcgtgtgcttttgaaagctaaactgcactggaaaagacgatgaagacgtcgatcaatttacttgtcttgttttccttttcgcctactacgtaatatataacacatgatccgatctggtttcgtattcatcacctaactgcagtaagccaccagacttctcctataatcctgtagttagctgatgtgaagtgttgctctccttctccttcatattcgcacgctacaaaagcaaaatcaagagaaaactaatattatagcatttgctcggaaagcgcaacctgggtcatcgtcacaatgatgaagctcttctttaccgtgtactttgaaggtactttgaagtacaagggtggacctttcgtgatcaactcagatgtggctagtgagttgctcgtgtatcgatactatcgatagccacagcgcgggtaggtgctttgatacacatacaaacaaaccctcacgtcgggaaaataacaaccagctccgaaatacttcaacatgcattagcctcaagcgtcatctttattttaatatgcgtagccccgaacaacctacagaagacactcaaaccaaatcaccggcttgatggcgtcgcggaagaagctgtttccgttgaggaacgccgtgtcggcgtgattgcacttggacacgtagaacttgtcctcgtagctgtcgctgaactgcgtggccgggagtccgcctcggcagctttcgaaagtcacgatgccgtcgtgttcatcagtgccgtgctcaatcttggcgccaaggaagagatactcaggctgatacttggaaaccgtgccgatgttgtcgttgctgcacatggcggccgacacgtgcttgcggtacacttcctgagcagccacatacgcctcgttcagcgccatcgtgctgtacttgccgcccatgtacgcaatggacttcatgccagcgccaacggggcacttgcccagcagcgtcaggatctttcggaacgcctgcgtgtcgtcgtccgtgcaaatgtcttgcacatagttagaagccattgtgccgttcatgggcgcgctcatgctgacccacgtggtgctgttgtcaatgctgcacttctcgttggcgaccgcgcccgcgagcatcaaggcgcccattgagtgggtcacaatgatggtgtccttgatggcggttgcgtcgctcgagttgctcatggacagcgcgtgcttgcagaccttgtcctgcagcttcccgttcgtccaacgcacgttcaaagtgtcgagggacgcgtacttgatgctcgagcagcacggcgcgtggtccgtcatgtcgccgaagctgtccgacttggtctgcagctcggccttctccacttcgttgcgctcgccgtggatgaagaggcacgggcggggcgtggacttgcactcgcacccggtcgagccgaagccccactccgccttaagctgtcggtcattctgagaggtaccggcggacaccaccacagccaacaaggcgaacgccgtcgagagagttcggccccacatcgtgataccgctacagaggaatgaacgagactggttcaaaacgaggaatggagttccgagcacaccaagccagagggtccaatcccatgaacacgaaccctgcaaagcatgaaagcgccatcatgctgttttatggcaacacgaacgcatacaaacagcaagagcacatcaacaagagtggcgcagatggcgcgttggaaggcgtttgcttcggaacagcagcggaagccggcgttcggcgcgatgagtttcgcgagagcaacgagattactgtaggatagggaagcacggtggagcgtcgagcgccccagactctatcataggggccagacgccttggcgaagttcttctcgagagccgataagagaggtcagtatttgattgctaaaccaatacatgtacaaaaaccaatacagtactgtatgctcgtcgttcgattgcaactttcggaggtccagacccgttcaagtgtcgatgaaactccagtggtgggtgtgatgcacaacaaaaaccaggcgacggcgcaaacatgtttgcggtagaccactgcctgggctggaatagcaccggcattttggtggtcaaatactggagatcacttcgagtactgtactgtgtgccgccaccggtgcttttcaccgtagctggcagagtgtcagcaaggttgccattgcttctccatgactagcattccttgcgcttctctgtcattgcatctatccaatcagggcaagttcttcaatgaatttagccaatcacgatcgattcgtgtgtatcccaacattttcccaattattttgggaatttacagtcttgctagaataatgtccaatacaaaagtttagtgtaattgttgcattactcatatttgaccgcaaattcccaatacaaatcatgattgtatcgttggtggctgtgactcgtctgctttctctcctctcccatttgaaaagatgcagctggcgccgagagggcttgacatcgcgcaagggacagcagggcaggaggcagcggcgatgaagtgcttcagcgaattcttagctcttgctaacatgaatgaggagtcaattgctagtattgcgaagtcgctgtctattcctgatgctcgaccaaatcaaaactttttactctttgctaaccgccttctccattttcttgcaaactaagccaagtgctcgaggaggcggtcttgctaaggctactgctgtgggctatatgtcccaagttgtgaacctgctccgagagcggtaccctctgtacttgtcagacagcaagcgaattgcgaaaatacgcgacaaaataggttcaactattgaggagcgaaatttgctagctggcgtgcagactggtgaagctccagtctgcacgctcagcgacttgcgtgttctggtgcaggaaactgcgattaagggggttggctcaggttataagagtttgcataacgctgctgtactaacgttaatgtggcacacgtttggtcgagcgatcgatacctgttttgctaggaagagccagctatctatggcggcatcggaggagctctttctgcatctagctcgaatcaagacttcggtggttcaaggcatctcaatttacaaggccgcgacccactgggagcagtgtatgctgcacggcctcggaatgctgttcgtcggagcgtcggagccttccagctatgtgttcccgctagtgccgcacgcggcggcatcggatttgccaggggagaagaccgacagccaagacgaagctatactctactgggagaaacttgaagagaaagctgaaccaaggaacgagccaccaacaaagcacgtgagaggaaggcccaacgtatccaagtatattaacgacgtcatcaccatggtctgcaagcgccaagcccaggcctctgccccgctgcccccgacgctcaccgcacggctgagcagccactccttgcaccgcggctccgcagcgtatgcaaacgcctcaccgcagcttgcgatccagtggatctcgacccggggagcttggctgctggactcgctcacgaaggcgttcgcgtacgtgggtaccacgacacgcgaggaccagagtgtcggcaaagtcctcgctggataccgagacccgcacctgccatgcgtcacgcccacgattgccaccttgagcgagcttcttcctgcgctcgagtacgcccagctgctaaccctgcgccgccagctcttcaagaacgtcagcggcttcacggacaccacgctcaacgttgacgccttagtcctggatgcggtgctcgcgtccctgctcatccatcttgacaacgtcgcgacggcagtccagcaggagcaggctgccacaggcttcacatcgcattacctgtaccgcttccccgacgctctggacgcaaccaacgtagcgctgggagctcggctctcgctggacacgtgcattggttggggtcggcagcttcgaacggcttggcaaacggagaacttcggacagctgggtgaacgcagcaatggaaacaccaccatacttgccgcagccgtcacccagatgctatcgtccatcgcagcaatgcagcgcacacttcagaagctcgtcgcggtccacgatagcaagtccaccagcgctgacggtcctgctccttgtcgctgtgctggccaggccccgcaggcgagcactgacaccgtcgttgaagcgcactctcttgctggctgcttctacaactggtacacactggagctgtggcacgcggcaacccaaaagaaacaacagtttgttcgcgctgacctcaaggcaggcgtcaacatcatgatcatagcagcagggcgagaggtaaacgtaccaacggcgccactggaccgggacggcgtcgcgtatcggctgtggaagcagcgtgtctggacgctagcggaagacttggacaagaaggtctacgctgcgcttgggagtatcgacggtaaaggccgatccaaaaccgcggggtcgctacggaagcgctggagaaagctgcgcgttgaccacctctctgcgtacgacgcgctctgctcagcatttatcacccgcaaagcgaacggtggcatcgtcgaccgctgcacaccagctagtcaccaatggaagcaaaaagacttggagtcgtaggatcacgcagcttgtattaacgcttaatacattcctattcatacaacatggataatcgaattcaaagcgcaaatgcacccgtcatcgccatcctacaacttaagcacagcgcatggattcccgtcagtcccgatacaaagtcatacacaatagaaaaacgctcacataccgtcagcgagcgcgctcgacctcgtgcttggccgacagctaccaaaaccggcaacataacacccgccctgccgggttttgtaactgctttcgacgggtccttgcgtggggcgcgtggggcgcgcctgggggcactcgggtctggggtggtcggcgggggaggcgtgcggcacgcttggagcgcgctgtcgtgttggagatgcggggcggaaagtgtgaaggcggagaaggctgcgcagccggccaaaaataaaaccttaaggtttttcttggctttggagtcgataaaccagtccatactttgttgaagtcatttggaatctcaggcgcggcgtatcaaactctatcgtcgctcaagctgaagaccgagcggaagtcacagcgtagcgacgccagcaaagcgctctctaagtttgagagacgctccgcccccaatcgcaggaaatgaagcaagtgtcgttccattgcccgtttgaatccggctttggctctgggatcggttccagctggaggattcgctgaggttgttcgctgtaggtacattgctgtatctttgattgagatgcccctggttcaggtcaggggaaacaaagtaaaacttgagttataatacgcgtcggtacatatctgcatgccgagtacccgtagatgtcgttactcgcacccgctgtgtctccctatctgttgccacacagataacgctggcaatcccacgaaacccatccgtcacgcaaaatgataaatactgtatgcgagctcaggagatttcacgctggcgatctcatcagcacgaaggaatcgttttgcggaaagcgctcagtaaaaatgtgggtatgctcgagaactgttctccagtagatagcgttggtgtcctcagtcttcacttgcacaacaaccttttaataatggtctcaaagttcgaggttgccaaacattcaacggagacgcccctttcccttcactcacacacacgacatggcatacacgttgaagtcagcggtccaatacaagcccccggagcggattgctttgacgtggagacccaccgaccaacaatttggatacacgtattaataccaacttgtcgatgccccaccgagattctgacgaccgtcacgcgctcttggtggtcgcacggcaactttattgtgatggaaaaaatactgatctgacaccgcgattcctttagcagacttcaacgtgatgccacgttggctgtgaccgaaggaaagctacagcaacgccgtctaatacaatgaattttgatgtcattctaaagcaaccagaagaaggaaacatgcaaagtaaagcgtccgttgttgcgatttatctgttcgccgctctagcctcagctgccacctacgcggatacttcccacgtttcccaccgaagactcgcttcaagcgcagcaccttggaagtcatggaagtcttcggtcagtcccagttctacgccttcgccaagcccgtcgtatcctccgacaacaccttcatccgctacgacggctacgctgcattcgttagcggcaccacggagcacacgtggacggcgtagcgtactacgtcactgctcctattaacgactcgagctccatcgagactgcacggcgcctggattccagtacgattcctccgctgaactccatcttcacgtcactcaacgacgccactccgtctcagcaagcgacgatagcatcaaccgttcaagcggtgacctgtttaaggtttcatttggtggagctgactttgttcgtctggggcctcgggcttcaccatttacgggagcgacttggacatcgccgtcgagtacctggataaacctgtcgaggtatcggcgccaacactcgctgccgatgctgcggtggtatgcgaaactgtggtcactcctcaatccgtcacgtcgacgaccctggcattgctcaccgggggtggcatttctagtgacacccgtaggaagctgaaggccgaagcgggcgtgacgatctcctcgtcttcgtgctcgtgcagctccacgccgcgcccgtgcatcttcttccgtggcatgggctcgacgaccgagtactcgacgctgcagaccacttccgactactggggcgacattgagaaacacgcgccgtgctgctggtcgttcagctacgcgatcctgaacactgtcgactacgcgtggacagacgccacccagcagaagaaagtgtgcgatttcgctctctccgtcagctcgtccagcagtaaatcgaccaaagttgtggcagacacaatcgttgtcacgcactctatgagcgggctgatggtcgctggtgctttggccaatgcagcgtgcatattcgcattcagcaccacgtgggtgagcatgagtccgccgatgggcggcagtatgagctccgactaagcctgcaaggcgcgtgcagcggttcctcgaagtcgtcgcgacgctaatcggccgttgtcctgcaggcaccgcgtcgaaatcgttggcgtacgaaggcgaatcttacagcatcaccgcactcaatgaggcatacaaggcggcgcaacaagcgtaccggtcgaacgtcgacgcagcctgcagcgacaacttgtcgctgcacacggctgcgacaactactcgggactgctctccacggatacgatggtagtgcgttctacttgacgggactcaaccatgcagacacgactttccgtcacggcgacgctctcttcgtcaactcacagaaacccgtcaagtggttcgagtgtctgctctagtaaatgcaaattcgagcaagtttcattgaatgtgatagtgctcagaagtcaacgggcataactaaagtaatggcccaaatagcgagcaaggctctgggtagtcgactcgtacgcaatgggttcccccgtgagcagggctaacgtcgttgctgtcactgaggaaggcgtgacgatggtctggcactcgcgcgcctcatcttcgctaattgaaggtgctgcgatggggacgggtgtgtccatgtacttgacgctgatgtccaggtcgctgccgtagaccacaaagcccgaggagcccgacgcgcagagcacgaagactgcgtcacccaatgtgatcttgaacaggtctccgctcttgcacgtgacctccttatcgtccaccgtcgcgctcgagatggcagtggcttcgttcagagctgggatgacgtagtcaaggagcaccaacgagctcgacatcgagcactcggcggtcactgcaccgtcggctgtcgtcgtgatgaagtaggcgatgccggcgatcatcgagatcgtgtggttcgtgccgccctccatgaacgtcgcgtacccgtcgtagcgcacggtggacttgtctgcagacacgaccgggttggccaagacgtcgaactcgagctggccgtacatgctcatggaggcgcgcttgagcttgaagtggatccgcagcgaccgtgcgtcgtcaagcgtcgaatcgaggcgtcgacgcgcgctttggccagttgcggagcttgaaacggccgcgaacgcgagcaccacgagcaagccgagtgccagtaggcgaggagatggcacggagcgccacatgaggcaacagcggtgggcgttgagggaggagctacggagacgtgttccttatctcgcgaaaaactcgaagtgagcgagtgagaccgcggtcggcgcagcgccgcatcttgggtagcattctgcatggggaggatctgctgggctcgagcgtgttgcacttggtgtcccccatcaactcgcacgcagctgccgtgactggatggcaaccagtcatgctctggtgacagaggtggcgccgggaaggaggagatgacaccggcagattctgcctgctgccgcagaaggatccgaatgacatgggcgggtgcaatgacatccagccagcgggctgtcagtcatcggcgtcaagaatcgaggcctgctcgcgtgatggctgacaccgtgacgatctttctgacagcttctaggtgatgggactgcaacaccgacacgttgaagctgctcgaagcaagcaaaggatctttgggcgcgagattctagggaatcaagttcagctaacactgccacgttcacgccaacgttggcgcctgcaacccacgccttgaacggcagcattttcacgacggacgtgatgctccaaagatttcccgaaagcgcatcgcccgtggacacacccggtgtttgacgccgcctgtgaagcgaaggtggcgtccaacacaggacgcgaagggagccgctacttgcggcatgctaggaatttgcaacagtgtacagtacgatagtagcgatggctttgatcgtgatgttcatgatactccgcggactcgaacgcgctaagaacctgcacaccttagttgtgcaaataatgccgagtacttcaaccaccaccagagtgggggccctgccttgttgaagtgctcgatttcggtgtaaaacgagccacggcctggtagcacagcggtccaccgctggcggctaatagtgcacgtacgcgatatcagtgcgagtcgcactctagctggcacaacagaatttggggctcagtcgacgtgctgaatgggcatggatcgcggactttgaggcaaagctaccaggaaacttcaaggatacgcaaacggctcgaggaggacgtttaacttcaacgcgaagcagcacttggtaagccgcccgggctttcaccgacctgcaagcgttgctgtacaaggcgcactgcaaaaagttgaaaaacaggagaaagttgctctctcgacaagagttcaacaaaaaagtccatcctcctgttacgcaggagatcaagcttgaggcgtgacgatgcctgagccgatgatggtccggaaacgctggcattgccgactcagtgctattgcggacagctactctttcttcacagttgcaatacgcccgtcgtcctcaaatctggacgttctcccatcatcttacatgcatgaaaatgcagcatctaggaattgatatcagtgcaagtaattagtaaaagcgtggtgctgcagttaataaccatcggtttgaaggtctcgctgttagaaatggccgccaccgatttgtgtgccactcttggcgccagaaatgtaccgacagcccgctacatcatgtagcctacatgcatgtcattcattgccctccagtgctgtcatgacatcgtgcatccacttcggctaactacctttgggcttagagagcggcacgcgcagccctacgccatgcccctttcacggcgcaaaactgcaagtccgtcaaatcatcgacatcggtgtccagcttgtttgacgccgctagccaagacgccgactcaagacctcactttccaacttgcctcgtgcggcaccaaccagcccaacaccagctcaagaacttatcgcaatgtgggctctcaagtcgccgcaccggttcctcaccgccgtcttcgtcgcgctgctcgcaatcgcagccatcaccactgcgtccgccgatgaccacgcccaacgccgtctagctacgagtcttggcgacgcgccgtcactgcgacttcaattcacgctcaagcgcgactccatgaaaatctacggccagtcccagttctacgtcttcgccaacccggtagtgtcctccgacaacacttccgttctttacgacggctacgctgcgttcatggacggctccacggactacacgttgagccttgtgaacggcatcgcgtactttgtgacttcgacggtgggcgactcgagctcgcagtcggcacagtgtctgtcgtcgagcctccttccaccgatcaactccatcgtgtcggcactcaacggcgccacggccattgctggtgcgtctgcaggcaacgacaccattacgtgcgcgaccggagacctgttccaagccacgctcggtgacgcgaccttcgtgatctgctcggctggctcggacggcttcaccatctacggcagtgacctggacatcagcgtcgagtacctcgacagtcctgtggcgatcaccgcgcccacgctgagcggtgacgcagctctttcgtgcgagacggtggtcactcctactacggtcacgccgacgacgcttgctctgctcacaggcgaggccgtgtcctcgtctagcagtcgcaagctgaaggctgaggctactacgacgctggcctcgtcgtcttgcagttgcaagtccacccgtcgtccgtgcattttcttccacggcctgggctccgacacggaacagacgacgctgcagacgtcttcgagctactttggtgatctctcaaagaacgcgccgtgctgcagctcgatcaagtacgctgtacttaacaccgtgaagaccccgtggaccgacgcgacgcagcagcagaaggtgtgcaacttcgctctctccgtcagcagcacaagcagcacctcgtccaagaccattgcggacacgatcattgtgacgcattcgatgggtggactcatgatggcaggagcgttggccaacaaccgatgcaagtttgcgtcgagcacgacctgggtgagtctgagtgctcctatgaccggaagcatgggctcggactaccttcagaacgcatgcagtggcagcaacgtgttccttcaggctgtggcgaacctcgttggtcagtgcccggccagcaacgcggtcgtggggatgtcctaccagtccgagtcgcacagcacgtcggcgctgaactctgcgtacacggctgcccagaccgcgttccgggcgaacgtcgacgctgcaatgtgcagcgacaactactcggggctactatctacggatcaaattgtatacaagctgggaggctctctgattccccacaagtcggatgagaacgatggcatcgtcgagtacaagagctgcgccgggggactctccacctccaagttcggcaacaagtacgacgacacgttctacctgacgggtctcaaccacgccgacacggccttccgccacggcgacgctctggtcgtgaactcgcagaagcccgtcaagtggttcgagtgtctgttgtaagcgttgctcgtttttcacctttcctcgactaaaaggtgactaaaaagcaacaaggtcttgtcttttgggttttcaaacatttgtagtgcccccttcgtacaccgaaaaaatatccttgaagttgaagttggtcccactgttgtgatggttcaagttttgtaggttcggtagtcgctagatgtgccgaaggagacctcgcacggaatgatttgggcgtatacttgcgcaatttgccgtgcaactaaggactagagctgtcgacgtcgagggttttgacgttgacccgacgtctttttctgtcgacgtccgtgggtgtcagccgacgtcgagccgacacacgccgacatcctccgctcgactttctgctgattggtcaaaaggagttttggtgaagccaatgaaatcgcctgacctcagacgtgcccattgcctcaatcaacttgtacccgcgactcaaacaaacagccaagtccgataatgattttcacttggaagagctccgctatcgaatgatgtagagtctacacctttggtctacactgtagaccaggtagcagcgagtctgcctgaacgatgggatgcccatgccccggatgaactacaaaataaggggtggacgctgattcaagctgagtagcttgcatgaggcgccctagcaagtgttgactgcgctcagacagcgacttgagtatcagcgccagccatgttgtcaaaggcgtcgtctccggctgggccgaatacaccagaccatgacgcgccttcaatggttcctttgtcgtctgggagttgcgcaactgcatacatctctagatccaattacgaggttaactgagtggaacacgggctcacatgtaggtcatcgcaagcattaacgtcggcagtgtttgtactcgatcctattgcgatctatagtggagaagttgcccctctaagtttcaccgagacactatttactaacagagtacgttatgtgtatgtactcacgtccctcaatgaggctaaggcagggtgcgccacctcgcgctgtgtaaggatcctatttcgcaatagtgatatccttttggatgtcgactgggtgtcggctcgacgtccctcgacgacttttggacgtccgggtgttagccggagcgacgacccgacgtcgacagttctactaaggacacccaacgcttgcttgcttgagcgggcgatggcccatcgccgatgagcgagcgggaaatcttcatttccagatattcccacgtgaaatgctgccgttagcaccctccatcaaccctcggtgcaaaagccgcaaccaaggatttgtacgtgtagttagttgtgatacagtgtatattcacgcagccatccgcgtttaacgcgtctatcgctcaatgccattgcactgactgaggactgagagccgtcctatttggcctcgataacgaatcgttcttaacgatacctgaaaggatcgtactgtactgtaaaacaacgcgagtactgaggcatggttttgaccgacaacccgctggatgcatgtcattaggaccaattcctccctactgtatgtgaccgacgcacatgcagctctatccaagctatccgctatcccttcgactccttgtgatcatgcaaccatcgcaactgcgagtgctctccttcaagacggagagtaatacgcatgccaccacacgaggcgcacctctcacggcgtcaacggcttacaagtgcaaggtcttaagacgtaccagcactctccgctggcaatgaactcgcgacttgccccgcttcattcgtcattctccaaattccatcgcggcaaccaagccagcccaacaccagctcaagaacctactgcaatgtggaacctcaagtcgccgcatcggttcctcgccgccgtcttcttcgcgctgctcgcaatcgcagccatcaccactgcgtctgcggatgaccaagctcatcgtcgactggtcaccagccttggcgacgcgccatcactgcgacttcaattcacgctcaagcgcgactccatgaaaatctacggccagtcccagttctacgtcttcgccaacccggtagtgtcctccgacaacacttccgttctttacgacggctacgctgcgttcatggacggctccacggactacacgttgagccttgtgaacggcatcgcgtactttgtgacttcgacggtgggcgactcgagctcgcagtcggcacagtgtctgtcgtcgagcctccttccaccgatcaactccatcgtgtcggcactcaacggcgccacggccattgctggtgcgtctgcaggcaacgacaccattacgtgcgcgaccggagacctgttccaagccacgctcggtgacgcgaccttcgtgatctgctcggctggctcggacggcttcaccatctacggcagtgacctggacatcagcgtcgagtacctcgacagtcctgtggcgatcaccgcgcccacgctgagcggtgacgcagctctttcgtgcgagacggtggtcactcctactacggtcacgccgacgacgcttgctctgctcacaggcgaggccgtgtcctcgtctagcagtcgcaagctgaaggctgaggctactacgacgctggcctcgtcgtcttgcagttgcaagtcgaccccacgtccgtgcatcttcttccacggcctgggctccgacaccgaggagaccaccctgcagacgacgtccagctacttcggagacctgactgacagcgctccgtgctgcacatccatccagtacgccgccttgaacaccgtcgactacgcttggacggacgcgacgctgcagcagaaggtgtgcaacttcgccatctccgtgagcagcacgagcagttcgtcatcaaaaacgatcgcggatacgatcgtggtcacgcactcgatgggcggcctcatgatggccggcgccatcgcaaacagtcgttgcagcctggcctcgagcagtacgtgggtgagtctgagcgcgccgatgacggggagtatgggcgcggactaccttgagggcgcgtgcgccggcagcaacgtgttcctgcaagccgtggccaacttgattggagagtgtccagccagcaccgctgttgtcgctctctcgtacgagggcgcgacttacagcacgtcagcgctgaacacggcctatgttgctgctcagtcggcgttccggtcgaacgtcgatgctgcgatctgtagtgacaactactcgggcctgctttcagtttaccaagcggagtatattttggctggtgaagtgatcccgcacaaatccagtgagaacgacggagtcgtggagtaccaaagctgcgctgggggtctgtccacgtccaagttcggcactacctacgacgacaccttttatttgacggggctcaaccacatcgacaccaccttccgcaatggcgactcgctggttacgaactcgaagaagccggtcaagtggtttgagtgtttgttgtaagctgcgttcggcacgaggagcgtagccttttaatgttccagtcaatcatcaagtgcttcctacattcccttggttatacatgcaggtgctctaagcggtgctgcttttgccataatggactcgaacatttggaggggatattttctgtttaatacgcacaatgatattttcaggaaaactcaacgcatttggcgatcggcatttgaagtgggagggcaacgacttcgataagactgcaaacggagcactcggccatcgacgatgcgagtcgatcggaactcgattttagtttctcggatgcggacttcaatgataggcatgcatcgtaaaataaccatagaaagcccacacttccaaccaacatagcacatcaccgtggatgattcaatcgctccaccttcctcctgtcgggcggatcaagtgattgacgacgggtactcttgagtcatgatacagtctccctacgacattgtacgcctcatggtaaatagtgttgtcccaaccaaatctggcggcagattgctggcggctcaaagcagggcaggggccattatcttgttgttgggaacaacttgttgcagtggaaggataggggcacttgcccatccgatgagctgtcagaaaacgatcatagtgataccactcgagtcacgcaaactcatcacgttgaagtgagtcattatatccctttgccagtgtcacctcctttcccggatgtgctaggaagcgccgagaagcggtctccatctctgtcaccaaagtatacaatccaaccatcacagctgaaggaatgatcgagtattggcaagccatgcccttgccgcaaggggaacgccctcactgccaagagcaaccgcatcaaactcgctaatcgcaccaacctgttgccaatccttcactttccaaattgcatcgcagcgagcaaaccagcccaacaccagctcaagaacttatcgcaatgtgggctctcaagtcgccgcaccggttcctcaccgccgtcttcgtcgcgctgctcgcaatcgcagccatcaccactgcgtccgccgatgaccacgcccaacgccgtctagctacgagtcttggcgacgcgccgtcactgcgacttcaattcacgctcaagcgcgactccatgaaaatctacggccagtcccagttctacgtcttcgccaacccggtagtgtcctccgacaacacttccgttctttacgacggctacgctgcgttcatggacggctccacggactacacgttgagccttgtgaacggcatcgcgtactttgtgacgtcgacgtgggcgactcgagctcgcagtcggcacagtgtctgtcgtcgagcctccttccaccgatcaactccatcgtgtcggcactcaacggcgccacggccattgctggtgcgtctgcaggcaacgacaccattacgtgcgcgaccggagacctgttccaagccacgctcggtgacgcgaccttcgtgatctgctcggctggctcggacggcttcaccatctacggcagtgacctggacatcagcgtcgagtacctcgacagtcctgtggcgatcaccgcgcccacgctgagcggtgacgcagctctttcgtgcgagacggtggtcactcctactacggtcacgccgacgacgcttgctctgctcacaggcgaggccgtgtcctcgtctagcagtcgcaagctgaaggctgaggctactacgacgctggcctcgtcgtcttgcagttgcaagtcgaccccacgtccgtgcatcttcttccacggcctgggctccgacaccgaggagaccaccctgcagacgacgtccagctacttcggagacctgactgacagcgctccgtgctgcacatccatccagtacgccgtcttgaacaccgtcgactacgcttggacggacgcgacgctgcagcagaaggtgtgcaacttcgccatctccgtgagcagcacgagcagttcgtcatcaaaaacgatcgcggatacgatcgtggtcacgcactcgatgggcggcctcatgatggccggcgccatcgcaaacagtcgttgcagcctggcctcgagcagtacgtgggtgagtctgagcgcgccgatgacggggagtatgggcgcggactaccttcagaacgcgtgcagtggcagcaatgtgttcctcgaggcgattgcaaacctgatcggtgaatgccccgccagcaccgctgtggtggggctttcgtacgaggacgagacctacagcacgtcagcgctgaacacggcctatgttgctgctcagtcggcgttccggtcgaacgtcgatgctgcgatctgtagtgacaactactcgggcctgctttcagtttaccaagcggagtatatattggctggtgaagtgatcccgcacaaatccagtgagaacgacggagtcgtggagtaccaaagctgcgctgggggtctgtccacgtccaagttcggcacctacgacgacacctactacttgacggggctcaatcatatcgataccaccttccgcaatggcgacgcgctcatcgtgaactcgcagaagcccgtcaagtggttcgagtgcctgctgtaaaaaggggaacgttgaaactgaaattgtgctcacaaaaaggtacacccaatattgtgctgtcacaaaaaatgtacccaagagcctaagagtcagtgtaccggtattatcggttttgtgtagctacaaacagtatacccatcacccaaaatatccgttctgtgtggtcacaaatttgactagtggtttgtatagtttcgatcgcacaaaatatatttgggatttgttcccagcagtgtttcaaaatgagagcgttttaccataatgtgatacaagttgaacgcggttaatgcgtctcccgcaccccaaagagcaacttgagccaaaaaaatgtaatgcgagccaaatccctatttgaaaggtggctcaggatccccgagctacactgaagctgcaacctaagccactgaaaaatatgactttaactcagtacatgagatcgcttgatctcatgtactgatcattatcgaaccatggcggcggcggcgctgagcggatccagcttcgtgccgctgtgcacgagctccgagggctcggacggccgcggcctgcggctacacaacgctggcgtcgacgtcctcaatggggcgaagctggcggcgcgcaagatcgcgctcgtgggcgtgctgaacgtggcggaggacgagaagacggagccggagcgcggcctgttcctgagctccagcgccgcgtccgtggccgagcaggacgccagcatgctgctgctcgtgctgcgcggcgtctctctagccgacgagccgttctggggctcgctgctgttcgtgctgagctcgcacgtggtggtgagcaaggccggccccacctccagcgccagcttccaggccgcgctgccgttcctgccggactttaccaagctgcaggtggccgaagggtctgttgatggggacaggaacgccgcgctgctcaaggagctggcgccgcgcttcacgtggggcgcggtggacctcaagatcaaggacatgaacggctgcgactcggcgtcgacgtacttcgagcagcagctggccgcgggatccacggacgcgcagcagctgctgagtgctctagtgccagtgagagacgctgtggtgctcaagtccaactcattccaggcgccggaggagccgcactcgtcccccaagctgctgacgcacgtggccgaccgactcgagtgcaaatccttcttcggacgctatatgagcggggcgctgctggtgagactcatccggtcgttgatccatgcaatggccatgccggacggatcccccgtagtgcttcaacgcgtcgtaaccaacgtgttcgtcgcgcactggcaggaactggtgcagcgcgcgttcaaggcgtactgcgacctgctgcacgcgcggctggcggtgtacgagcgcgcgccgattacggccgagtaccttgtcgatgttacggagaggaagctgaaggcgaaccaggctcaggacaacaagcactcggccgtcgtgaacgctggccaggggaacttttcggtcttcgacgagttcggcaacttaaagaagcaacaggtatccgaggacggcgcggaggatagtatggtggcagcgacaaccccggcgccgctaaacactggactatttagcttcctgaagaacagagctggccgtgccctcagcaagcagctctcgcggttccctactaaccggtggagcacgtcgattaaagctggaggacaagcaactgctcagggtgacagcggtggacttggtgggatcctggaagacgtagaagcagcggaagcagaattacgggaagaggcaaacgcagcgcaatcgcctgatctgctgctggcgcgatgcactgcaagcattacgcgctactcagtgccgatggaatacctgaacacacccagtgaggccatgcctgtaaacacatcggtgttagacacaatgcacgccgaagggctggaggaagtgaacgctttgctgaagccgtttctcgtggatctgcgcggccccatgccttcaagtcctgagcttgcttgctcgctggattttcatgtcggaaagaaaaacttgtgggcgaagttggtccgcgtccggaggcgcttcgagcgcgccaatgaagtgtcctcggcaatcttttgcggcgagctgctgcgttatctgcactctgtagtgctccgcaagaacgaaacagacaccgaggatcaacaacagcagcagcaacttcgaggtcgcgctgtctcgtcgatcatgctggtggacaagaagagcggaaacgcgcctgttgccctcacgcgggtgccgttggagttgctgacgtacaagaacaacctggaggcaatggtgtcgcagtacaatttcgtggcccgtggccctcaagctgctacagtgctcgcaggcttcctcaacggaccagtgcgccgccagcttcaacacttgacggagcaagagtacgaccgattcactgcagcctgcgatgagaaggagcgtcgcatcaaggagttggaggagtcgctggaggacaaagagcgccaggtgaagcacatcacgaaagcaaacgcagagtggggtcgtcaagaacgcgaggctgttgccaacatcgagcagggtcatgccgagcaagtgagctcgcttcaagactcaattcggagcacggaagctaagatcgagggtgcgctagcagaacagcaggctttgtaccaaagcaccatgcaggctacgcggcgaacaatcgacacagtggacaaggtggccgacaagggccgcatcgtgtccggctacttggagcgctacgagaaggcccacgtgttctcgtcgcggtggcgccagtacttctatgttctgaagcacgcaacactcacgtgctacaagtccaagagcgagtatgaggagcgaggacccccgttcgagcggccgattagcatcagtggatacaaggtcgtccaaagccgcaccgatgaactcaagatcaagctggtcccccccgaggcgggccaccaaatgcttcgcttccgtgcacctgccagcgtgggtcgcgagacgtggatgaagcggttcgctgaggccacgcaatattccggtcaataagtgcccaagaaacacaatccggagctgtcgtcaaggcaagacaaagtcagtatcgcaaacgaaagtaacttgtgaaagtccgttcgttggttggttgggccgtatcctccctcatctaagctgcagtggtttgccaagtgaggcctgaaattcttccgtctctttggcgcgatcttcactttgcttcgtagctgctagtccaggcatgttttcaaaggagaaacgggagcgagcaggcccctcaaagaagaaatcgtgcacaagggcctaaacaacgacaacatcacccgttagcaagctcatgaccacaattgtgtacaggtaacggcacctgtcgagctgatagccgtttgcttggatcgagcacaaggagcttggacaacagatccactgcagaagcctgagcatctgggaagagcttgctgagagccatcggatcatagggtgggaaggagaccttgttgaagtcgggcagctcgcacacgcccggccactgcttctcgatgtctcctagcacctgcacgactcggaagatctggtcaatgtcgttctggccagcgaacaacggggtaggccgcaacaactcggcgaagatggtgccgacagcccacatgtccacggcggtgtcgtaatgtctggcgccaaatagcagctccggcgcccgataccagcgcgtggccacttggtgcgagtacgagcgcccttcccgcccaacgaagacggtagcgagtccgaagtcgctgagtttgagcactccgtcggcactcagcaacaagttgccgggcttcaggtctcgatggagaatgttgtgctcgtgacagcaagcgacgccgtgtagcagcatccgcaggagaccgcggacatcggcagggtggaggggttccagtcgattacggacaacactgaggaggtcggtggacatgtactcgagcaccagagcgatgtagctgccgtccgacacgacatccagcagcttgacgatctgcagcagcacaaacagtaagtttgaggacaagaagatctctcgacgtatccatccatacattgggatgctggagctggcgcatggcctcgatctcctggaactgggcggccggcacgaccgagagctggccgtcgtcattcacccgaagccgcttgatagctcgaacctcgcccgactgcaggtccttggcccgatggacctctccgaaggccccgttgccgatcttctccagcagttcgtagcgactcgcgagcatcctggagggagaggcctgtgacgattaggatcaaacaaaaagatacttttacttgattgacgagacaccggaccggcaagactcacggcatgtgggcacaagcgacctggaatattcattcttgcatccctcccctctctctgagagggggtgcagcttaaatgacgcctctgctaaaaagtatgagaagtaaaagaatacactggcaaggacggcgagcgctccgtgggttctgtttcttgtcgctctcaactcctacgactcgctcactaaccccgagccgcagctccgtcgtcgcgtgcctgctggacaccttcgctgacctgtctgcgatttaactgcttagtggttgttcttccacaccaggtaccgcgtgtcgcccagcttacgcggactcagcttgtgcttggcgaagaagaggatggccagcaccatgcagagcgcacccacgatgatgtacgcgatgccgaggaacgggttgcggccgccgaaccatgatgtggtcgagatcacgatagacttcttgccctcgaaagtgctcaccacgaagtctgccaagtcacaaacaaaccactcagttagataccgtcctctgcacttggaacaagccaagaaatcaatacaaaaacgtactgctggagacgaggaactcgatctccgtgccctctgccagatctgtgtcaatgcggccgtagagcttgcggaagctcggcagaccggccgtgcgcatccagacgataaagtgctcgtcctgcacgccgtacgcaggcgcagccgtcgtccacgccgtcttgttggcgatcgcctcctggccctcgtacatggggatgatgtagcggtagcgcgggttctgccacagcatcatcgtgttgtccgcgtccgacaggtccgccaggtcgatgttcttgaacttggtctcgacgtccgacttccaggcgatgcccgtctggtccacgagattcacgagcgtcttgccgttgtacgtgtcgtcctggtagtacgtcttgccgtcggccacgagcttgttgacccagaaaatgtcgttgaagaggctgttggcgatgaggccgcagggcatcagcgtgtagtccgtctcgttgtcgccgatggccttctccgccgtcgagttgtacttgtacatgcccgtgccggacttggtcagcggcgagcagtcgctcgtgctggccgtggcatctccgcggagctgcgcgtcgctgcggctctgcacgtagcggcggtggttctggtagaagttgtccagctggtagtagaggtacacgggcgccttcatctccttctcgatcgtgaacttgatcctacagccgtgcgtgtccacgtcgaacgagtcgccgtcgctctcgtcctcgaggtagcagccgctgcccaagtccacgatgttggacgatttctccacgccgtctccgtcgtactggatcgagtactccaccacctacagcccgcagccagccagcaatgcataagtacataggatacacacaatggcagagacgtagacagagataatggacgtacattgtccgactcggtgtgcagcacgatgccgatggggatgaagatgaggcccacgacggcgaaggtgccgatgacccagttgggcgtgaggatcggctgccaggccttgagcttctgctgcttgaacggggtgtctagcgatagagatagagatagcgaggggtcaggttagttagagcggggtgtcgttgttcttgttggcgttgctgctgctgctgctgctgcgcgcaccttccggtttcctcgacttctcgtccatggtggcgatgtctcgctccaaggtctgcttgcggtgtagctcccttcctcctatggcgcagcgcgggcgtctcggggcggcgcctgcttccttcctcctcttgcgatggtaacaataggcgacgcgggggtttcgcgccgattgtccgcacgctgtcccgagcgcaaatatccagtttgagaagcgaaggcgagcccgcccattggctgaaacagcctgattatcgcacgcgcattggccaacgcattttccgtcgtaatccctgcgtgcaccacaccatacacaactatccaaatgggttcatagcgtggtccacctcatagcgtacttagctggccacccgccccagcggatacattagacagacggccatgagctaccgggaccgggatgaccgccgcggcggcggctacgacggctcctcgacgagcagatacggcggcggggactctggaggacgcagcagagaccggtcgcgcgacaggccgcgcgaccgggactcgtaccgcagcggcggaggacgcgacaggtctcgggatcgcggcggcagggacgcgccgcgccgggccgagtacggcggcggcagcgacagcagatacggcggcagcgggcgcgaccgagacggcggagacgacagaggatcggcgccgcccgcggagcagcaggaggagagccagcccaaggtgtcgggcgcctgggaccccgccaaggaggcgctggccgaccccacgtgggcgcgcatctacatctcgaacctgcccacggacgtgacgagcgacgagctgcaggaaatgttcggcgccatcggcgtcgtggcgcgcgagaagcagaagcgcggctacaaggaccagtggcccttcaagatcaagatatacacggacgccgcgggccagcccaagggcgacgccgtgctcacgtacgaggattcgaacgcggcgcgcacggcgccagagttcttcaacggtgcgctatatttgctacgattgttttgcaatgatttgtggtgttgatagagtgctgacctttgtgtttgttgctgccaatgaacgatgcaggagcggacattcgcgggaagaccatcaaggtggagctcgcgggcaagcccgagcctccggtgggcggctggcacggcggaggcaacagcggaggaggcggcggcgggcgccgcggcggacgttttggcggagggggagatagatatggcggcggaggaggaggctacagtcgatacggcggtggaggcggcggtggcgaccgcgacttccgagaccgacccgaccgccgctcgcgtccgtactgagagcagcgacagcgtgtccattaggtgccctccatatccagatagcagcagtgtgtagcagtgtccttgagccccagcgagagagcgttaaaaggcgtcaaccgcagtgtccaccagaagtgtccaccttgaagtaaccccccgttcggggacatgattttgcgaccgcggttttgacctcaaagtcccgtttcgattggcgagattttgcgaaatattgcgatacgccggccaatcacgcgtcaggagctcaactcaggcattcttcgcgcatccggcgagagagatatcccggaccagactctctctctgcgtctgctgccccatgggcgtgttcaacgtgctcgcgctgtccgtggagacgtcggtgctgggctggtacctgctggcgccgctggcgtccccgggcggcagcgccgtgctcgcgcgggacctgcgcgacgcgctgcacttccgccagtcgctggcgctgcaggcgctgctgtcgctgctgcggctgctcttcttcgtgtacatccggcgccgcaacaagcgcgtgccgtccacgcgctgcttcgtgttcgtcgtgtcgctcgtggaggtggcgggctgcgcgctgggctcgctgcagccgctgctgtacctggacggagcacagatcgacacgttcgccaagttccggcgcgtgcgctggggcggcttctacgcggcggtgctgtgtgcattgggcatcttcagcacgctgctgcaacttggctacatcctgcaactcaacaagagtcgggggaggctggcggacgacaacctgctgcgcgacgtcatggtgggcgagacgccgcgcgccaagtggaggtccaagtgggccacgctgggcaagcagctggcagggagacgcaagcccaaggacccgacgttcgaggccatggtgaggctctacgcgcaccaggagggggccgtggacaggctggcggtgtcgtccgacagagatgaagaggagttcgagttctatctgccgcaactgtgcagctttttgctgttgggggcgtttgcaaggtcgccgcagttgtgtgccatgctactgcggaagtgcagtgtgtaagtttgaagattttggggatggaggtgtagtgaggtgctaataatttggtgctttttgggtgatctggacaggtcgcacgtgttcgcgcacaaaatgctgtggtacttgcagtcctactgcctgcacaatccggcgttcgccacggatgccgacttccagcgcgtgcagatgctgatcgaagacgtggctgagcgcggtacggctcccgcgatggttattgcgtgtccgcccagtccggttaattcggagcaccaacctcagtatcgttccgaacgcggttcaggggtgtcagctagcgcgcaggaagtggaagcgttgctgccaggttcccaggacgaccactacgccacgttccaggataataacgatctcgagcgaggagtggcgagctcagtcattgcgcctaaagtgccccctgccaccggcgccgagccgtttgagcttgagacgacgttcctgggatcactcgccaatgtatcgtcgaacttgagggctgtcgcgtacgatcaacgcaacgatatggtaagcgacttagtcctttcgtttcggtattgccagttccctgacctcggttgtatgccattgtgacagcttcgcatttggcttcaagatctagaggcgcagtatctgccgagcaactcgctgtacctgcctgtcggcaactcataccaccggctcaagcacatccacgtggacgagagctttacgttctcgacgcgagagcgtgtgccgttcttgctctgcgctgaggtcgtggactatccgtccccgcaagaagagctcgctgcacggcagaagcgccgcagcaacagcgtgtttaacggtcggcgattcacgctcagcttgtgggatactgcaagcactcctgagttgacggcagctacgcccgcggaacgcacaccattgatgtctccggacgcgtcgaagcttggtttctggagtgagtcgcgtacgccgagcagcccgactcgacttcgctcgttctcgcaccatatctcgaacaaaatggcgcaaccgactgagctactgcacggactgattgactctttggtcggcaaggtccccggcggcaagaacttcgatcccaagggcgaggcattacttagcaacgttgattctggagaatatggcgaggattcgcccaagcgcttccgagatctaccggagcgaagccaaagtcagccatttttcaagagctcaggcatgttccccaagcgaaccctcacagttgacacgagtgtagtaggacttcgatcaacacaccccgagtcggcgcggagccagccagcggccgcatctatcgtgcctgttactactgacatcgatgaaatcgagtctgccagcagtgtcagcggtccgtggtcgccgaagtcggagactgtactgtcgccccagtccgagagctcagcgtgttcaccgaaccacctctcacggttcgacagcacagatcgtttcttacaggatctatcggagcgtgattcaaagctggaggaagacgaggaagctgagagcagcgacccctcctccgaaacccgtcaccaaagtgcagctgaaccacccgcagtcatatttaaggagcgttgggtggagaaagagcgtcgtatccaagccacttccccttacgggaagctcccgggctggaggttgctgcctgtgatcgtcaaaagtgacgacgacctgcgtcaggagcagctggccttgcagctaatccaccagttcgccaaggtgtttgaagagttcaaggtgccggtcttcatccgtccgtatgatgtgatcgctatctccgctacgtcgggactcgtcgaggccatctcggacaccatctccatcgactcgctgaaacgcaacgaccgcgagttcacgacgctgttggacttcttcacgaggcatttcggtgacccgagcacgcccgagttccggagggcccgatccaactttgtgagcagtatggccggctacgcgatcgtgtgttacctgctccagatcaaggaccgacacaacggcaacatcttactggacgccgaagggcacattatccacatcgacttcggcttcatcctgtcgaacaacccgggcaacatggccttcgagcaggctccgttcaagctcacggccgattttgtagagctcatgggtggcccgcggtccgcgcacttccggcggttccgctctctgtgtgtgcgtgcgttcctcgtcgctcgcaagtatcgtcaccgcttcgtgctgctcgtggagatgatgctgcacgggaacgagcacttgccgtgctttgctggggacccgaagggtacagtcgagcgcctggccgctcggttccagcccgacctggacatcaactcgtgcgaggactttgtgcacgagctgattgacgcgtcgctcgacaactggcgaacacgctggtacgacaagtaccagcgatggatcgtcggggttttctaggcaccgagtagtggccgagcgtgtgcagtccagagcgctcgagagagaggaacgagaaacactaggagctagaggagaagacatgcgctgttataagcctctccaattcagacagaccactttgtatcgatcgatgaaacgacgcgtctattgctgcgtcactagtccgtggctggccggaggtgagtctctgcgatggaccagcacttgacgcggcgggctcgagctgagcagaagaagaggattaaggctgccaagcgcaagttgcagccaggatggaagcccgggcggtccaagcgccgcaagcagcttgccgcgtccatgatccagcgctgcttcaggtcgcacctgcttcgtcaagcctttcaacgctctcgacagaacgtgcgcttcacgttcaactcgctgcgggcgttcggtcacgcgcggagtcgccagcattggcgcaatgtggatttgaggaggctttctcgagaagagctgagacttctagcgctgacactcaacttgccgtcgacgggcaagaaggtgttgctcatctgccggattcagcgctgggtagaccagcacgtactggtcaacgacgtggctgcggaggctgctgctcgagcgctggaaaatcgtcgcaaagctcaaggcagtgtctacttcagcgaagcgcatcctggagctgacctcgttgacatccgaccactgcgaggccactacatcacgagcatcgccgcggtacgtcttgtgaagcttcgaccttgatccatctcgactctgacagactgggtgctggctgacagggctccgaatccgacgctgtgtatgcgctggatggtgctcgaggtgcagcgtggctgtgccgaacaggagggttggcgtctcaagtggggctctgcagccacgttcatcggcacgacgagttcgagccatctccgcgtgaaagtcactggcttgctacccccgtgttcctccacacattgcgtacggagcacgtcgatcgcgtttacgtggcgcgaggccatgcgatggcgcttgccaaagcgggcgaactgttcagctggggggataatgcgcatggagctttgggtttcgcagcggagtcagcagctcaagtggcacggaatcgagcgacggtggtcggagccttggcgaactatcaggcggtggctgcggccgtgggaggacaccacagcatcgctgtgtgtgatcaggtcgctggccatgacggcgtggtcttctgttggggcagcaattcacacggtcaacttggtatcagcccgtccagttcctctaccattgacaaattgaccgatggctcggccaagagagagccaaccacgtttcctcgagcagcggtgattcaccaggtggccacacttcgctcggtatcggtccgtcttgtggcttgtggcgttcttcactcgctagcgttgacgtccgatggtaaggtgtactcctgggggtgcagcgatggcggacggttgggccatgttaaaccgttgaagcgcagcagcgatgtcggtgagcctgctctggttagtggtgttcttaccaacctcgttgtactgaggattgcttgtggcgcgtggcatagtgcatgcatcgctgcagaagcctcacaagctgatagtggagctggccgtgtcttcacttggggtactggtgtctacggacagcttggcgtagggaaggctcaagtcacgtacgagccccaagtcgtccgtttacctccgcgtgagcttgacgacgaagtgctggccacgcgactcgcatgcgggacgcaccatacagccgcgttgacagttgctaatcgcatctttacgtggggaagcactcgggcatttcacggagtcccaactgagctgagactacctgatggtgagcgctttggacgcgtcgcgtcactcgcctgtggacgcacattcactgtgttcaacacggtttctcgagacgcagcaagctacgagtggcccgaagtcccgaggctttggcgggataaaccgacggtcattccgcgcttggatctctccaagctgccgacgccaccgctgtgtacatcgaatccgctgcctccgttcagcaaaggtgcccacgtgaccaagtcctccagccaactgccgtctccagtacgccttgaaccgttcgccgatcgatgtgctcgagaagctgaggagctgcgtgaggccaaacgcatcgacgatatcgacatcgaagcgattgtccacccgctgtgccgcttgtgctggcggtgcaacgggtttcagccgtctccgttgcggctgtggatgtgtcggaattgctcccatgagcgccaactgcatggaacaaggaaacccggggttcctatgggcgagtatgaagcagttcgcaagctgcagtgcttgttccgtgcacggcgagctcgacgagtgatgcagcgtgctcgtgagcagcgctatcagcgcatcttctgcatcgcgcacgacgagttcttctactacaacttgtggcagcacagtaagtcttggacgcggcctgcggagatcagtgaagacttcgaagtcccaatccgtgaccctgatgcttcgccccggatatcgcccccattcacgcccgtagaagctgcagtaaaacttcaagctgtatggcgaggcttccaggctcgacaactgatcaagaagctgctgagtgagcggtacgagaagcacttcgacctggagaaggagcgcgtgtactacatccggaaacctggtattccaagacctgccaagaaggagccgctgacgaagttgtgggatcctcctcctttgctgcgcaagaggtacgaccttggtgagcctgtggaaatccagagattagccaggttcgccaacatcgcccctgatgaagctgctcggataatgcagcatgcgtaccgatgctatcggggacgtgagttcatgcgccgaattctgcgatcgcggatcaagaaactctgggacgccatgacgggaaggtattactactacaacgccaccactaaggagtcctcatgggagaaaccacgactgctacttcatgacggtgacgacgacgacaaccagggaccgaaggttggccgtaatgatacgaatgccgacgctcatggacggagacgacacgccgtcaatgtgcggccggagaagttcaacactgaggaagctgcagcacgtacaatccaggcactctaccggcggttcgcgacgcgcaagatgctgctggagctgcttagccgtaggtatcgcaaaatgatggacccggtatctggccagccgtactattacgacagcgtcgctggtactgcgacttggtttaagccagccgtgttaggagactacgaccttgagctcttcgacgactcggttactgcatccgcttcaggaaagaggaaaagtacgctcatcgccccacagtcgtctgctgctttctccgctgtagttaaactgccgcgcatcagtgagcgcgcacgccagaagcgacacaagcgaagactgcagagactgcggcaaatgtcgcgtgatgaagccgcttcacgtctacagcgcatgtggcgcacacaccgggccaaagaggagctgcgtgacctgctcttcgacgcgtacgagaaaatcttcgacccgacaacggagcacttctactactacaaccgcaagacgggagtagcgaagtgggagaaaccggcacttcttgtgggcgacgaacgagatatcaaagagacgaagattatcaagagacggcgctctcacaccgtcaccgagccaaccgaagccaagctagtggtgttcacgttcatgcgctgcgccgctgcacgtctggaactccaccgcctgctgaaagagcgcatccagaaagttttcgaccccaactcacaacagtactattattttgataaacttaccggccagtcctcgtggaaaaagcccgtgacgctcaaaggatacgacctgactccggtgtaaaacctacggaacgggttggcaggagtagtgcagcagcgtgccattgggcaagcgcacgaacgtaccaacacccaacttcttgccacacgattggcagcactgggacgaccagacagtgacggatcccttccgcttggtcgacagctgctcccgcaccttgaagttctccatcttggagagctgtttcttgacctgtccattgcggaagcgctcgacctggcgctccagaacacgacggaagaatcctgccaagggggctgctgcgacgtcagcaggtagaagttcgagcgcggtggacacgtcaatacgttcagcatacttgttcaacacattgatggctgcgttgacagcttcactctgcaaaccgggaagtgaggctgatcttccagctcggttccacacaggagaaggctgcggtggcgagcctacatttggtgatgcggatcctccagatgatccacccgtgaattgtggccgcaggtagatcgttagcagcgtagagtagatagatgagtcggccgtctttgcttcgtagcaccgattgcagtaggcttccgctagagctgcgtcctttaattccagagcatagagttgaagcacctcacggtgacgcccgagcttcgacagcagcgctgcgtgttcatcaatcatttcaacaggtgtgcgactcagcattcgctctgggtggtaggcagcagctgggaactcgagaaactcaagcaacttgcgtcgcaaaagccccgtcatgccacgctgagactcaacgcgactcgtgagcctcttcttctgtggtgtcttggcttggattgaatccaagagtagatagactacctcgtcatgcaaccgcggcgtaagctggtacggaccctcgtagataacttgtgtcagatactcgatcgccagcatttgactgtttgtcaagggcaaaaccggtttggttgtttcctcagcgccaccatcagattcaagtacctccactgtcgtcgagtcatcgctagaagctgcgatagagcaactcttcaagtgctgcagtatcgcggcaggatcaatatcctgtttggtgctgggtacttcgcgctgagtaaaaatcgataggcctagcgctgggttaaccgacaaaacacgccgcgaaaactcgaacactagctccgcgtgctttttgcccagcacacgaaggtactgcgcgatgagcaccatataatcgtgtgacgactgcagatcttccgtgtcttcaggttcgtccttcgcgcccgtctcggtcttttcatacagagtagcagccgaggcagcgctgcgctccagatcctccagtagctcaagggccttacgatgcaatttccgcgcggagtagaatgccaacaacgccttgaaacgccgatgagcacgaaggaagatctccgcctcgctgatctcacaccaattttggtcggtgaccacctcgagcagagctcgcttcgcacgttcttcatactttgctttttccgccaccacaaccaggcacttcaccagcatcgtgtcgatcagttccagcgcactgtcatcgctaggtccaaaactgcggcgtaagtgaaaacccatagtcaatcgttcttcatcgcgctgcagataagcgttccgcttacgacgcaaaagtccaatcagcgccagcaaactctccaccaactcgtcaccttccaacgtgtgatccttgttgttgttgctgttgtccttgtgcaacgcactggccttgcgaggaagcaaattccgtgggaaaagcagcagcacttccatcacatcaatgtcactctcaaagaagaagttcatggcctccttccgatggcccgatcgaaacaatttgaagccatagtccgcgtaaagcttccgctggtcggtgtcactcagaggactctcttcggggcacaacttgcagagcgagacagcatcttcaagccgacggttccccatggacgccgcgacttgctgggcgattgacagcatttggaacgactgaacgtcgaacggcggggacactgtatacagcgtcgggggttggtcatccttgaactgcggcgcactagcaaacgggtccgccacggtcgcagacgccacattgatggcggcacagacaccataaggtgctttaaccggcagcgtctgcaccatttgcagtgatccaaagttgtacaccgcgatctgctccccctggtccagcagcaagaaggggtgatggtaatacactccccttggcggcatattataggtaaccactctgtccaccttcatgcccaactgactcgtcgacacgtccagcgccttgcccacactctcatcccccaacctgctcacgtcttgctcaaaggctccatacacatcctcctcctcttcgtccccactcttcttctccatcgaatcaatcgtcagaatcactccacgctgcttcccgcacagcagcaagtccagcacctgctggcgtcgtcgagccgcgtacaaactaggaagggccaccgcgtcacagacagcagtgacccctccatccagagcttcattgacctgctgcatcacgtcctccttgacactcagtggccggccgctgtccagattcagaaccacccactccttcttgccctggataaacacgtgactctcactgagtaacagcagccgctgaaccggcagcagcgtcggtagcagcgtctgcagctcgtgctgcgcgcgcggctcgaggatcctgttgacggtccagtcgaagaccttgagtgtattgctcttaagcagcacgcacagcgtcttggccgcctcgtgggccgcgaactgcacggcgcccttggtgtcgtcgcgggccacgaggccgcggccgccggcgtcgcgcgcgccgtccagctgcgggttgctctgcagcggcaggtccagcagcttgaggcggttgtcggccagtgtggcgaagacgccccaggcgtccaggaacgtcgcgttggcgtggaacagccgcttgtaatccgcctgccagcgcaagaggccggcgcgctcgtccgccacgtagctgcgcagtgtgccgtccgccgacgcgcccgtgaacagcagcggggacagctcgccccacgcgcgcaggctgcgcagcacgcgctccgtctgctgcggccgcttgggcgggccgtccacctccacacgggcgccgggggcgtacgccgccgcaggagcgaggtcctccgacgagctcatcgtcgctcctggggccttttgatgggcaagaagaagataccttgtgtaaaatggctttttagagcgcttgctggaccttaatctcgaatattgtataatatgcatgtggttcgctgataagcaggaatcatgcaataatactatattagtattaataatgtataaatactatttcaaattagtaattgttcatgtaacttaactgatcaatgacgttaactaacttcaacttcgggtgatacatgtgcacctcgaagtaaagtctacagtaataggtagttgccgccctccattgacatgttcaagacctgaccaagcgtagtagagtctatgcaggcgctacggcctccgctcgctttgtctcgactgagcagcgttgatctcggtgatcgacgtggcgatccattcgcgacgtttcatgaacgggtgattggcacggaaactatcaacgaagatctcgcccgaccaaagatggagagacgaatgctagctatgctgctcctactgctgcttccagtcaccgtcgtgcaggtcgcagacgctgcgtgtgccaactcgtgctcgggccacggccgatgcggcgcctccaagtgcgacgcgttttctgctgtcctgacgccgacaatttctcatgcggatcaattgtttttccatgcagccaatgtacgtgcgattccgactgggccctagctcccgactgctctctccgcaaatgccccacgggtgtggcctggacggataaggcgagggcggcgaacgcagcacacgcggtggccgagtgctcaaatcgcggcgtgtgcgactactccaaggtgggataagagcattaaagagcatgaaatcatgatgaagttatagacattctactgctccaaacagggcgagtgcacgtgcttcaatggttatactggggctgcttgtcagcgacgtaagtttcccagcccaagtatattgacggaatcactatgagtgctcatacctcgtgtactgtagttcgctgcccgtcggactgctctggtcatggactctgttattcttctgctacattggcgtcgcagtacggtccgagctcgctcgctggcggcgggccgacgtacactaactgggagaaggagagcatgacgagttgtatgtgcgatatgggatacaccgggcccgactgctcccagagtgcgttgcctgtgatgaaaactattgtattacattcggctggctaacatttgctgaacaactccagccatgtgcgcaaagaacgatgatccacttacgacaggccaagcgtatcgaactatcaagattcaagtgggtgccgatcctacacctggtatagctttggcggggtctgtgcgggtccactttctcggagaagttgcagttttcagtgccgttgtagtcgcagatgctgcccatgaaactgcgtgtgcgcaagcatttcaaagcatgcgcaccgttttgactgctacatgctcgatttccagtgtggattcggtaacaaaaggggccatctatacagtggcgttcacggaatgggtgcacttgggaggggagaataacttgctgtatcataatgggaacccgccgttgtccagttttacgtgcgatctcagccaagttacgagcgcgaacacccccacgtgtgtgatcaccgatggcgttgcgaccaacgtaataggtaagtttgatttctgtattatccttaccatcgtttgaaatctaatcgtgacacttgctgcgaatgtatcaaaagagcatgtatattgctccaaccgcggtctctgtgatttcagtaccggccaatgcgtttgctacgcagactttaagggaatggactgcaatcagccgtctaacattcctgacagtatcgacgacaatgacgggtttatcatcaatcctctcgggctcgcgtacacgggtacagttctgcatctgaagacagcgaaagggtctcaagcagacttctactttatgaagattgagtcgtccacgttgccgattctgaccatggacggcatgggagacacaaaactgttacatggtgatcttgagctgtcaaccggcgcattgacgataactaccatcgctcagacgtcaccagctgcggatattgcggacactcacattaccttcacaagtacagtgctgaaagtccgtgcaagcagactattgagtactaacttcaaattgtttgaagcaatggtggcggatacgaacactgttgtcgacattcgtggagatggcctcactaccatttatactggtggactgaatgtcgtgacgggtggagcgacaattgctaacaccgtgaatgctccaagtcttaccgtcatcaactcgtttggtacattcagcaattcactcctcaagctgtcgacttcacgcgctacgctgtatcctgtggctactgacttcttactgatcgatgccagcgcgaataatgtaccagcgtttactgtggaggcttctgggaggactacgatcgctaatggtgggctcattgtgaatggacttggaggagggcaaatttcaaactcagatactgcagcttctgcgctcgttgtgagtgccacgtcgacgagttttgccagtgatgctgtgtctataaataccttttccgggctaactcacaatatgctgaaggtcacgactcaagtcgcccctgctgccgctgtggatctgtttacgattgataacactgggttgacgactattactcagggcggtctgtatattacttctgggggcgctaccgtcaattcgggcggacttcgtatcgtaaatggaggcgaaactattgagttcggagggctacgagtgaagaatggaggagaaactattgaattgggcggcctaaatgttatcaacggtggaggcaaaattgccacaacgtcagctacgactgatgtactcacagttgaagcaactgcgaccactttctccagtaacgcaagagttttacgcatcaattcaaaatcaacgatagaccccacggtgagcatgcactatttgttagaagccacagtaggagcgagcagcacctccgttttcaaagttgatgctactgggctgaccacgatcgtgggccaagggagcggcggagccagcatttccgacacaggcacctcggccaacacgctcacgctcaccaattccgcgtccagcttcaacaaaaaggtgctcgggatggtcgcgacggataccaatggctactcgttcatcgatgccaccgtgggcagcacgtctgtcttcaatgtggacgcgagcgggctcaccacgattgtgggtcagggcaccggcggagccagcatttccgactcggggacgacggccaacacgctcacgctcaccaattccgcgtccagcttcaacaaaaaggtgctcgggatggtcgcgacggataccaatggctactcgttcatcgatgccaccgtgggcagcacgtctgtcttcaatgtggacgcgagcgggctcaccacgattgtgggtcagggcaccggcggagccagcatttccgactcggggacgacggccaacacgctcacgctcaccaactcagcctccagtttcaaccaaaaggtgcttgggatggttgcgacggacaccgccgggttcttgttcatcgatgctgcggtggggtcgactcctacgtccgtcttcacggtggatgccaccgggctgaccacgatcgtgggccaagggagcggcggagccagcatttccgacacaggcacctcggccaacacgctcacgctcaccaattccgcgtccagcttcaacaaaaaggtgctcgggatggtcgcgacggataccaatggctactcgttcatcgatgccaccgtgggcagcacgtctgtcttcaatgtggacgcgagcgggctcaccacgattgtgggtcagggcaccggcggagccagcatttccgactcggggacgacggccaacacgctcacgcttaccaattctgctactacattcacaaaaacgatggtctccatgacctcgttcgatacagatggcagtgggttcaccttcatcgacgccaaggccggcgccacccccacgtccgtctttaaggtggccgcatcaggcgcgaccaccatatatggtggcgccacgatcaaggatacggggctgactattgacatgggcggcgccacgattacatcgggcgggttaaaagttgagaacggtggggcaacgatcacggccggaggcttgaccgtgaccgatggaggggccagcattaccaagtccacggacgcgaccacgctcgcgctcacgaactcggctgggaccttcaccaccacgatgttcaccttgacctcgtcggacacggatggcagtgggttcaccttcatcgacgccaaggccggcgccacccctgccaccgtctttaaggtcgcatcatctggtgcgaccaccatatacggtggcgccacgatcaaggatacggggctgactattgacatgggcggcgccacgattacatcgggcgggttaaaagttgagaacggtggggcaacgatcacggccggaggcttgaccgtgaccgatggaggggccagcattaccaagtccacggacgcgaccacgctcgcgctcacgaactcggctgggaccttcaccaccacgatgttcaccttgacctcgtcggacacggatggcagtgggttcaccttcatcgacgccaaggccggcgccacccccacgtccgtcttcaaggtggccgcatcaggcgcgaccaccatcgccgccgcggtgaccatccagaacaacggtctcacgatcacttctggtggagcgacgatcacggccggaggcttgaccgtgaccgatggaggggccagcattaccaagtccacggacgcgaccacgctcgcgctcacgaactcggctgggaccttcaccaccacgatgttcaccttgacctcgtcggacacggatggcagtgggttcaccttcatcgacgccaaggccggcgccacccctgccaccgtctttaaggtcgcatcatctggtgcgaccaccatatacggtggcgccacgatcaaggatacggggctgactattgacatgggcggcgccacgattacatcgggcgggttaaaagttgagaacggtggggcaacgatcacggccggaggcttgaccgtgaccgatggaggggccagcattaccaagtccacggacgcgaccacgctcgcgctcacgaactcggctgggaccttcaccaccacgatgttcaccttgacctcgtcggacacggatggcagtgggttcaccttcatcgacgccaaggccggcgccacccccacgtccgtcttcaaggtggccgcatcaggcgcgaccaccaacgccgccgcggtgaccatccagaacaacggtctcacgatcacttctggtggagcgacgatcacggccggaggcttgaccgtgaccgatggaggggccagcattaccaagtccacggacgcgaccacgctcgcgctcacgaactcggctgggaccttcaccaccacgatgttcaccttgacctcgtcggacacggatggcagtgggttcaccttcatcgacgccaaggccggcgccacccctgccaccgtctttaaggtcgcatcatctggtgcgaccaccatatacggtggcgccacgatcaaggatacggggctgactattgacatgggcggcgccacgattacatcgggcgggttaaaagttgagaacggtggggcaacgatcacggccggaggcttgaccgtgaccgatggaggggccagcattaccaagtccacggacgcgaccacgctcgcgctcacgaactcggctggggcccagaccaccacgatgttcaccttgacctcgtcggacacggatggcagtgggttcaccttcatcgacgccaaggccggcgccacccctgccaccgtctttaaggtcgcatcatctggtgcgaccaccatatatggtggcgccacgatcaaggatacggggctgactattgacatgggcggcgccacgattacatcgggcgggttaaaagttgagaacggtggggcaacgatcacggccggaggcttgaccgtgaccgatggaggggccagcattaccaagtccacggacgcgaccacgctcgcgctcacgaactcggctgggaccttcaccaccacgatgttcaccttgacctcgtcggacacggatggcagtgggttcaccttcatcgacgccaaggccggcgccacccccacgtccgtcttcaaggtggccgcatcaggcgcgaccaccatcgccgccgcggtgaccatccagaacaacggtctcacgatcacttctggtggagcgacgatcacggccggaggcttgaccgtgaccgatggaggggccagcattaccaagtccacggacgcgaccacgctcgcgctcacgaactcggccggggcccagaccaccacgatgttcaccttgacctcgtcggacacggatggcagtgggttcaccttcatcgacgccaaggccggcgccacccctgccaccgtcttcaaggtggccgcatcaggcgcgaccaccatcgccgccgcggtgaccatccagaacaacggtctcacgatcacttctggtggagcgacgatcacggccggaggcttgaccgtgaccgatggaggggccagcattaccaagtccacggacgcgaccacgctcgcgctcacgaactcggccggggcccagaccaccacgatgttcaccttgacctcgtcggacacggatggcagtgggttcaccttcatcgacgccaaggccggcgccacccctgccaccgtctttaaggtcgcatcatctggtgcgaccaccatatacggtggcgccacgatcaaggatacggggctgactattgacatgggcggcgccacgattacatcgggcgggttaaaagttgagaacggtggggcaacgatcacggccggaggcttgaccgtgaccgatggaggggccagcattaccaagtccacggacgcgaccacgctcgcgctcacgaactcggctgggaccttcaccaccacgatgttcaccttgacctcgtcggacacggatggcagtgggttcaccttcatcgacgccaaggccggcgccacccccacgtccgtcttcaaggtggccgcatcaggcgcgaccaccatcgccgccgcggtgaccatccagaacaacggtctcacgatcacttctggtggagcgacgatcacggccggaggcttgaccgtgaccgatggaggggccagcattaccaagtccacggacgcgaccacgctcgcgctcacgaactcggctgggaccttcaccaccacgatgttcaccttgacctcgtcggacacggatggcagtgggttcaccttcatcgacgccaaggccggcgccacccctgccaccgtcttcaaggtggccgcatcaggcgcgaccaccatcgccgccgcggtgaccatccagaacaacggtctcacgatcacttctggtggagcgacgatcacggccggaggcttgaccgtgaccgatggaggggccagcattaccaagtccacggacgcgaccacgctcgcgctcacgaactcggctgggaccttcaccaccacgatgttcaccttgacctcgtcggacacggatggcagtgggttcaccttcatcgacgccaaggccggcgccacccctgccaccgtcttcaaggtggccgcatcaggcgcgaccaccatcgccgccgcggtgaccatccagaacaacggtctcacgatcacttctggtggagcgacgatcacggccggaggcttgaccgtgaccgatggaggggccagcattaccaagtccacggacgcgaccacgctcgcgctcacgaactcggctgggaccttcaccaccacgatgttcaccttgacctcgtcggacacggatggcagtgggttcaccttcatcgacgccaaggccggcgccacccctgccaccgtctttaaggtcgcatcatctggtgcgaccaccatatacggtggcgccacgatcaaggatacggggctgactattgacatgggcggcgccacgattacatcgggcgggttaaaagttgagaacggtggggcaacgatcacggccggaggcttgaccgtgaccgatggaggggccagcattaccaagtccacggacgcgaccacgctcgcgctcacgaactcggctgggaccttcaccaccacgatgttcaccttgacctcgtcggacacggatggcagtgggttcaccttcatcgacgccaaggccggcgccacccccacgtccgtcttcaaggtggccgcatcaggcgcgaccaccaacgccgccgcggtgaccatccagaacaacggtctcacgatcacttctggtggagcgacgatcacggccggaggcttgaccgtgaccgatggaggggccagcattaccaagtccacggacgcgaccacgctcgcgctcacgaactcggctgggaccttcaccaccacgatgttcaccttgacctcgtcggacacggatggcagtgggttcaccttcatcgacgccaaggccggcgccacccccacgtccgtcttcaaggtggccgcatcaggcgcgaccaccatcgccgccgcggtgaccatccagaacaacggtctcacgatcacttctggtggagcgacgatcacggccggaggcttgaccgtgaccgatggaggggccagcattaccaagtccacggacgcgaccacgctcgcgctcacgaactcggccggggcccagaccaccacgatgttcaccttgacctcgtcggacacggatggcagtgggttcaccttcatcgacgccaaggccggcgccacccctgccaccgtcttcaaggtggccgcatcaggcgcgaccaccatcgccgccgcggtgaccatccagaacaacggtctcacgatcacttctggtggagcgacgatcacggccggaggcttgaccgtgaccgatggaggggccagcattaccaagtccacggacgcgaccacgctcgcgctcacgaactcggccggggcccagaccaccacgatgttcaccttgacctcgtcggacacggatggcagtgggttcaccttcatcgacgccaaggccggcgccacccctgccaccgtcttcaaggtggccgcatcaggcgcgaccaccatcgccgccgcggtgaccatccagaacaacggtctcacgatcacttctggtggagcgacgatcacggccggaggcttgaccgtgaccgatggaggggccagcattaccaagtccacggacgcgaccacgctcgcgctcacgaactcggctgggaccttcaccaccacgatgttcaccttgacctcgtcggacacggatggcagtgggttcaccttcatcgacgccaaggccggcgccacccccacgtccgtcttcaaggtggccgcatcaggcgcgaccaccatcgccgccgcggtgaccatccagaacaacggtctcacgatcacttctggtggagcgacgatcacggccggaggcttgaccgtgaccgatggaggggccagcattaccaagtccacggacgcgaccacgctcgcgctcacgaactcggctgggaccttcaccaccacgatgttcaccttgacctcgtcggacacggatggcagtgggttcaccttcatcgacgccaaggccggcgccacccctgccaccgtctttaaggtcgcatcatctggtgcgaccaccatatacggtggcgccacgatcaaggatacggggctgactattgacatgggcggcgccacgattacatcgggcgggttaaaagttgagaacggtggggcaacgatcacggccggaggcttgaccgtgaccgatggaggggccagcattaccaagtccacggacgcgaccacgctcgcgctcacgaactcggctgggaccttcaccaccacgatgttcaccttgacctcgtcggacacggatggcagtgggttcaccttcatcgacgccaaggccggcgccacccccacgtccgtcttcaaggtggccgcatcaggcgcgaccaccatcgccgccgcggtgaccatccagaacaacggtctcacgatcacttctggtggagcgacgatcacggccggaggcttgaccgtgaccgatggaggggccagcattaccaagtccacggacgcgaccacgctcgcgctcacgaactcggccggggcccagaccaccacgatgttcaccttgacctcgtcggacacggatggcagtgggttcaccttcatcgacgccaaggccggcgccacccctgccaccgtcttcaaggtggccgcatcaggcgcgaccaccatcgccgccgcggtgaccatccagaacaacggtctcacgatcacttctggtggagcgacgatcacggccggaggcttgaccgtgaccgatggaggggccagcattaccaagtccacggacgcgaccacgctcgcgctcacgaactcggctgggaccttcaccaccacgatgttcaccttgacctcgtcggacacggatggcagtgggttcaccttcatcgacgccaaggccggcgccacccctgccaccgtctttaaggtcgcatcatctggtgcgaccaccatatacggtggcgccacgatcaaggatacggggctgactattgacatgggcggcgccacgattacatcgggcgggttaaaagttgagaacggtggggcaacgatcacggccggaggcttgaccgtgaccgatggaggggccagcattaccaagtccacggacgcgaccacgctcgcgctcacgaactcggctgggaccttcaccaccacgatgttcaccttgacctcgtcggacacggatggcagtgggttcaccttcatcgacgccaaggccggcgccacccctgccaccgtcttcaaggtggccgcatcaggcgcgaccaccatcgccgccgcggtgaccatccagaacaacggtctcacgatcacttctggtggagcgacgatcacggccggaggcttgaccgtgaccgatggaggggccagcattaccaagtccacggacgcgaccacgctcgcgctcacgaactcggctgggaccttcaccaccacgatgttcaccttgacctcgtcggacacggatggcagtgggttcaccttcatcgacgccaaggccggcgccacccccacgtccgtcttcaaggtggccgcatcaggcgcgaccaccatcgccgccgcggtgaccatccagaacaacggtctcacgatcacttctggtggagcgacgatcacggccggaggcttgaccgtgaccgatggaggggccagcattaccaagtccacggacgcgaccacgctcgcgctcacgaactcggctgggaccttcaccaccacgatgttcaccttgacctcgtcggacacggatggcagtgggttcaccttcatcgacgccaaggccggcgccacccccacgtccgtcttcaaggtggccgcatcaggcgcgaccaccatcgccgccgcggtgaccatccagaacaacggtctcacgatcacttctggtggagcgacgatcacggccggaggcttgaccgtgaccgatggaggggccagcattaccaagtccacggacgcgaccacgctcgcgctcacgaactcggccggggcccagaccaccacgatgttcaccttgacctcgtcggacacggatggcagtgggttcaccttcatcgacgccaaggccggcgccacccctgccaccgtctttaaggtcgcatcatctggtgcgaccaccatatacggtggcgccacgatcaaggatacggggctgactattgacatgggcggcgccacgattacatcgggcgggttaaaagttgagaacggtggggcaacgatcacggccggaggcttgaccgtgaccgatggaggggccagcattaccaagtccacggacgcgaccacgctcgcgctcacgaactcggccggggcccagaccaccacgatgttcaccttgacctcgtcggacacggatggcagtgggttcaccttcatcgacgccaaggccggcgccacccctgccaccgtcttcaaggtggccgcatcaggcgcgaccaccatcgccgccgcggtgaccatccagaacaacggtctcacgatcacttctggtggagcgacgatcacggccggaggcttgaccgtgaccgatggaggggccagcattaccaagtccacggacgcgaccacgctcgcgctcacgaactcggccggggcccagaccaccacgatgttcaccttgacctcgtcggacacggatggcagtgggttcaccttcatcgacgccaaggccggcgccacccctgccaccgtcttcaaggtggccgcatcaggcgcgaccaccatcgccgccgcggtgaccatccagaacaacggtctcacgatcacttctggtggagcgacgatcacggccggaggcttgaccgtgaccgatggaggggccagcatttctgatatgggaacaacagccagtacgctaacgctgacgaactccgcatcaagctttaacaaagccatactatcgatggtttctactgccaccaccggcttttcggtcattgatgccaaggtgggcagctcgtccgtgttcaatgtggccccatccgggcttacgaccatttcggctggaggtctcagtgtctcagggggagccacgatatcaggcggtgtgacggtatccaatacgggactcacggtgtcgggcggtgtgacggtgtcgaatacgggtctaacggtatcagggggtgtgacggtgtccaacacgggtctcaccatatctggaggcggggccaccatagcaggtggcgtgacggtgtccaatacaggccttactgtgtcggggggtggggccagctttactggaggcatcactgctgtagacaccggagtcagcgtcaccaccggcggtgcgaggatctacgacactggtacttccgccgagacgctcacggtgaagaacagcgccagtggcatcaccaaggccattttgtacttggactcgacggagaccagtggtttcccgctcatcgatgctaaggtggccggcacgtcgcagttcaccgtgacggcagcagggctgacgacgatagcgtcgggtggcctcagcgtcaaaggtggtgtcactgttgtggacacaggtctcaccgtgtcaactggaattgttggcatctcggatacaacggcttcaacagtgagtacagacggcgctctcgttgtcagtggtggcgtcggcatcggggggagcattcgctgtgctggaacttcctacgcggtcacgcacacgaacacgtctgatcggcgtctgaagaccgcagtcaagaacttggaagcagcccaagagaccatcaggaagcttcgtccggtacgttcatcccttgtctcctctccatcagagccgtatcagctccatattcaccttgctaaacaaccttgttctctgatcttgccaccaggtgacgtacgagtggcggcgagatgaattcccgtcacgcaacttccccaccggcgtgttccctggtttcctcgctgacgaggtggaggaaattctgccggacctggtgcagcaggacggcgacggctggaagtcgatggactacaccggcatcgtgccgcatctggtgcgcgccgtgcaggagatgcaggaccaactcgaagcctcccaggcgcagatgacgcgcatgcagcagcagatcgacgcgtaaatttcaatcaaattcgtaacttcactccagtcgtcgtccagcagcttgtacttgctggcccgacttggcctgcaccaccagcgtcacatactcctccacggataattatcatgcgtctcctctttcttccggtggtctcctgcgcgctcttcaaggcacgcaagtcgcattcactgaatcgtacttagcgttcaaagtgcgtacttaagtacttgaagccgttgatgttcacaattcattttcgtcaacaagagtgcaatgacgggcagcgtcggggagcgtctgctgctgtcgctggcgttgggcgccgcgctggcggcttgtggctactactgcagcaagcttgttggtcgccgccgcccaaagagtctggcaacgttaaggctggctgcagcgccgcgcctcagtctgcgggagctctcgctgcaaagttctggccgttgggtggcgctgtgcggcacggcgttcgacgtgactggagacccgttcttcgacgagcagtgcgccggtatctacagctcgtgggtgggccacgacgtcacgtatttgttgctgcagttggggctggcgccggatgctgcggacgacgcggaggccgtggccagctacttggaccgcgagtggacgctggacgcgctgcagggagacgatgaggcggctagacgccgccgagagctgttgcaggagtggttcgtacgtctccagtcgaggtacgaggtggtggcgcagctcagcgaccgctacgttggcgcgccgtgggatacgttgagggagggtctgctaccgtcggattcgggctcgagttccggtggcaagtgcccgttgggattcggagcgaagacagtggacaaggttgtgtcgcgcaaggcagaagatgtggatgatatgcggacgatcacgttccaaggtcgacgttatgatgtggcgaactcgagtttgttccagccggagggcggacagtttgcacacttcgtcggtcacgatgtcacgtacgcgttagcggtgcactcgacgcgacttgaagatctggatgtgacgccttcgagagggcatacttttgaagagcagttgctgctggagaggtaccggaacttcttcgcacgtgaattggcgctagtagaagttgacgctgaacagaaggagagtggtggccaggcggaggtgattgatctgcaccaagtggttgaagagagtgacggcgtggcacaggaagagggcgtgcaacgagtgaaaaaagcgctagaagttgcgagctctgaccaagtgaacgctgtgtgctctcggaccacgatgactccgttacacaaggccgtggagaagcaccgcctggatctcgtaaaggtgttggtacaggctggtgcagatgtcaaggcgcgtgcagccctgtacgacgacgaaacgccgttagaaatggcgcgccgatttcacttcgacgacattgccacgcatctcgaagccgtcgccgtataattatcgtggaggctgtagctagctgacgatagcgcgttcaaggacaaataaccacgcgcatgaactacagggcctcggatgttggacattaatttttaactttgtgtcactgctgtggctagcagcggctacgcaaaatgttaggaggcggcgtcagtctgcctatcttatctcttagcacaagacttactctcagcgtcgtccttgatcacatagcatcttgtgaatatgtgcaatgtactccggtccaattccacagcagccaccaacaactccagctcccagctcaacccactgcgatacaaagtcactgtatcgctccactgccagatccgtacgcatggcttgcggctcactagactctgcaagcgcccaatcatccggaatgaccgtaagtcggttggcgtaagcgcctaagcgcactccacggtagattagacttccacgtgtgtgctcgtcgtcatgtagttctcggagagccttgcaaatggcctcaggctgcgagcaattgaagagaattgcttgcagctcggacccagacatggcggcagtgaagtccagcagctcccgtgctgcatcacacacgctctcaccactccgaatacgcccttacctattgagtgcaaacgaaaccataacttgtgcagatcctccatcatctccactccaagtctgctgcaccccgagcagcgccatcttggcctcctgaaccgacgacaacgtctcagccaagtagcagtccacaaatggcttcaatgcttttgcgatcatcgcgtagagtctcactccctcttcatgttctggcactttgtcggctcggtagctctttagcaatggcgggagtgagccgcagacctttgccttctgcctcgtcatgtccgtcgccgactccatccattgatcgcaggcctctcgcgccactcgccctactattgccgtcagtcggacgatctcctcgtcgctgaatccaacacccggcgtcactccgtagttgttgcatgtgatgcagtcggcgccaacagccaggaacgaagtgtgcacctctcgcagcagagcgtggtgctgcccgtgcacgagcgctgtagccgaccaaatgcggcggtcgtcgggcagcccacgagcgaataactcctcgccggtgcctccatcgagcagcggcatcttcgtcgatcgttgtgccgccgttgagactcgtcgcaacattcgaatgtatcctaacattttgacaagcgaaatgtttgagtttcgtggaacatgaaatttgtatgaaaaattgagcttgaagtattttttgaaaggcaagatgtgaatcgagctgcagcggctactagctgcgacagactagactcctatgcagctagcaagggtcctcagttgtgacctacaatgaaaggacttcggcgatgcgctgcaggtagtcaggcgggataccgcagcagccgccaacgatgctggcgccgtcgtcgatccagcgcatggcgaacttgctgtagatctccatgtccatcatggactgcagcgcgccaggtacgagcgactcctccatggcgccggccttggacattggcgagatgtggtcgccgtagccgccgatgcggatctcgtgcttcttgagcgtgtccatcagctccggagtttcctttagctgcttaatcgccttggcgatgtcctccggttgcgagcagttgaacaggataccgcacagcagattgtctttgccttgagcttcaccaggcaggagctccatgtggcgcgtgcaaaactcaaccaggctatgcacactctcgaccacgtcctcaccgctgcgcagttggccggtgctgttgagcgcgaaagaaaccatcacgggtttctgcagtggttgaacgccctcaaacgccatcttcgcctcggcaagcgacgacatggtctcagccacaaacacgtcgacggacgggagcaaagcctctccgatcagcaggtacgtgtccagtcccttttggcgctcaacagtgcgatccgagcgaaggctgtgcatcaatggtggcaacgacccgcagatcttggtgcggtcctcgcggttgcttctggaacgcgcgctcacagccaactcgccggccagttgcgagtactcgcggatctcatcgggagtgaaccccacgcccggggtcacgtagtagttgttggtgatgatcatggtagctccggccttgaggaagtcctcgtgggcctgcacgaccatgtgatggtgagccggagccaccaacgcactggccgccagcatgttgcggtcgttcggcaggccgcgacggaatagctcgtgcatgatgccgccagcaatgatgtcaactttcttcccctccatcgcggtttgttctgctctgcttccttctgcttccttcacggccaattcgtgaatgaatacaactaggtaagctgagagaattggctggctggttggctgccactaacaacatgtctgtctgcgacctggcaaaggaagaaaactccgcggcggcgtccctcaacggcgacgttgaagtggtccgatccacttctcattggccaaaagagctcgtgcattttctacgaatcgccgttgcgtatctaattcgaaggtcagacgctgacgttgagaaggaccatggcggacgagctggccgagatgacgtggctgcgcgtggcctgcgcggcggcgggcgccgtggtggtgccgctgctgatgcaccgcatcttcttccacaagaaggtgacgcacgagagctcggcgggcagcagctcgctggaggagtacatgaccaaggtgagctgcattctggctgtgtggagcctgtcggtggctgctggttaatttgactggggcgttgcatgctgcagcacggaatgagcgagctggatgccaagttccaagtggcagtggacttcatcgcggctcggggcaacaacaagctgacgaacgagcaggtggagggcgaatgcactactgtagagcgaggacggaggcgagggactactgacatgggtttgtgcgtgttgtgcttgcagagattgacgctctacgcgttctacaagcaggcgcatttcggcaagtgcagtgtggagaagccctcggctgtggacatggtcggctctgccaagtggtgcgtggtttggtggtgtgctggtgagaggcgagttgtagactagtgctaactgattcgggtggatgtttgtgcagggagagctggaaggcgctgggcgacttgagccaggacaaagcaaaggagcagtatgtggagtgggtgcaggatctgttcgaggagttcgacgtgcgtggccccaagcggtggcgctcgtcgtcgaacacgtcgtcgtcgaaggctacgagcgaggctgtgtcactggatagttcgatgtcgatggctggagctgtcagcatgccgaaggttgacatgtacgtgttgctgttgtattggcaagtgtgctctggggcattaaccactcggatcgcgtgtggttactgatacatacgtgtgtgcaatggctaggtcgacggaggagtggaaggtgaaggatgatgtattccactacgcgagtactggggatgtggacaagctcgtggctgcgttggacctgggcgaagacatcaatgcgcaggtaagctactaaccgctggcaccggacactccaactgatgtgcctgttacacgatcatagtagtggggacctaacgtgtgttaatgtgaaatttaggaccccgaaggtcgaacgatgctgcactgggctgttgaccgagaccagacgacgattgtggaggaactgctgcggcgcaaggcctctccgaatgttcaggtatgcaaagatcaaatgagccaagcgtgaatgtgttatcagcgtctgacacttgcggttgactgtgtattcctggtgagcaggatgccgacggcatgaccccgctgcattacgcggcgagttgtgagcacgaggacatggcccaactgttggtaagagtgtttacttgacagtaccgctacctcgttcgcagtagtccaactttcatgctttttcgtgcaggtaaagcacggcgcgctggtggatatcgaagacctcgacggtgacacaccgctcatgacggcctccagcaaagcgcttcagtcaattatggcggatggtccaaccagcgaccctcagtaaaccggggacgctgcaggccacacggttagctatgcgtacaccgtagaaaacaggtaggtatcatcatgtcagtgggttaagatggaaggaacggggcgttaaagcggattttttgcgtttgtcgagctcttgtatatcgcccctctgggcagattcaggctttccccaacgctgcggatttcgtggcgtgtgggtcttatcggtgactccacggcattttcgcgcagacgaatccactgggatggagttgtttgctccaccctatttttccgacagaagcggctttggcgatgtggccgcaatcgcggagattattcccgctgcacttcctctaggagaaggagatggagtaagcggggttaactgctccgatgatgcctaccgggaatggtgaaaattgaggcaatgatcgtctcaatccggccatgggctggtttcaattgttgggtgctattcacatgcgaacgagtcgtaactcgtcggccattcctatgctgtttttctccctacgacgccgctcgccttcctacacaaactggtcgaagggggcgtcgtggtcgtcgagcttctcggcgtacttgatcaggtccacgtggtgcttcaccggcacgttgcgtggcgagatcatggtcagttcctccatcgctcgtgcgaacgacacctcgcgcgcctgcttgcacgactgtagagcagatcggctcttcgcgatgccgtcgtctgtgggcaccggcgtgacgttctgtgcgcacatcgttgctgtcgagtcgctgctgtcagcggcctccgagtacgcgaactcgacggtctttcctaccgcgatctcctgacgcactgctgcctgctcctcgttcaggttaaacggaataaccagcggcatcttgggctggttggggctggccaccgcgccgctgcgggtgacctggttggccggcttggcgtccacgcagaggtcgtgcgggatgatgaatccgtgcgatccctgaatgtcaatgaccgtgccgcagtggagcacatccagtttgttgctgacctcagcgctgctgttgcgacgcgtgggggcctcgacgaccgtcgtggtcatggccgactccagggctccaatgctgtcctcgctctctcgtcggctaggcttctcctgaagggtggccgggaagggcgccgacacgttgacgatggccggcgacgcgatgttgagcgtcatggcggagacgccgtcctcgggcgtcttctgttccagctgctgctgggcgggggccacgtggggcagcgtgaccatgtcggccccgcatttctccatctccttgtcgaggaagtcctggtacgactgcgccgtcttgggcatcttgaactcctgcacggcgctggccacgctgagcgcgaccatgaagaggccggcgcccgtcatccagagctggaaacggcccaggctcatgacggccagcgccagcagcgccagcatgagcaggcccgcggccacggggcgcaccgccgcgtgggtggagaggcccgaggcctgctcggccgcgtggctggacacggtgcgcatggcgttcacgcccgagcgcaggatcttggcggacgtgcgtcgggacttggccatggtcaatcgggatctgtggtggtgtctggggggtctgactggggggactcgactcacgcggtcactatttttacggccaacacaatcaacacatgtaaggagggatgggacggtgccgaggcgaaaatagcgcgctaatggacgcacgttcgggccctgagggtgtagtgagctttgctgcggcgcggaagagcgcggcgactgcgtgtgggtggaggggagcgccttggctccctgctgctgcgttctgttcctttgcttgacgaggaaaactccgcaatccggccgcggttggtccacgtattgggaggaacgaacggcatttgtcatagcagacatactgggcgccagcgcttttgagcggggcgtgagttcgaagtaaagatcaggcgggctgcttgaaataccagctggaattagttgctgcgaggtcatggctctcgcaggctctcgagcggcgtcatgatcgccgagcgatgatcgggcgtggtggaaatttggcgctgtatgcgaagcgcggcgcgccgttcgaggcgccaacttcgcgttcctgcagcgcggatgaaatcattcatcccgatgatccgcccttgacaaatatccgccttgtcatgcatggcgccggccggccggtatccgtgacgacccgagtccggagcggccggcctcgacagccgaaagaccgaccgccctgattcaaatcaccgcccggcaaatggaaccagcctgccctgccctgccggcgcggtggacgttcaagcatgtgtgccggatctgctgctgcagcgttcagcgtcctccgcgccagctggacgtccgcttctgctgctcgctaccgagaaaactggccgacagcattgccgccgcctggcggagcgtcctcgagaggctgcgacgccaacgccatccgccgacgacaccgcgccatccgctgaggacggccgggggcccgtaaacacgggggtcaacatgagcttcgcatgcgctgccttcggtatccgcggtctcaacgtgtcgtcaattgcacccctcatcttgcatagttgccttttatgctacatgggagagatcgtcattctgatcaccgcaacgattgagctgatcacccgctgtgaccaagacgctgaggacgctgcaacaacacacgtgcgcagtacatgtactcactcgcacctgtcagggataacgtagttgaagctgcaccatcttggcccagttgtcggtgttgagtagatggccgagtgggaatcttttggcggctccaaaatggtcgaggggccgcgtcgcttcacggcgctttgggatcgctccataacgcagcaacagtagagcaagcactcgcagccgagagtgggggagactcgggcgccatgttcatcttcctgagcaagaagatcgccatccccaacaatgtcaagctgcggtgcgcgtcgtggaactcggagcagggctggatcgcgtgcggcgggcagcacggcctgctcaaggtgctgcggctcgagtcggccgcgcagacggacggcaagggcccgcgcggcatcgcggccgccagcaacctcaccatgaaccagtcgctcgagggccacaacggcgccgtcgtgtgcgccacgtggaacgccaacttcaagaagctcaccacgagcgacgagaacgggctcatcattgtgtgggtgctgcaccgcggcatgtggtacgaggagatgatcaacaaccgcaacaagagcgtggtgcgcgatatgaagtggaccaccgacggccagaagatctgcatcgcctacgaggacggcgccgtcatcgtcggctccgtcgatggcaaccgtctctggggcaaggagatgaagacgcagctagccttcgtggagtggtcacccgacggtaagtcgctgctgttcgtgaccaaggacggcgaggtggcagtacacgatgccatgggcaacaaagtgagcaacttgacgctgtatgctgtggagtcacgcggcggtggcaacgactacaagatcatcggcgtgcactggtacgacggtatcgagggccacatcagccaggaggcacccacgttggccattgcgttccgcgacggcaaagtgcagattactcgtggcaggtttgacgagaacgcggtgcttatcgacactgggatggagttaacccaggtgaggtggaacaacgacggcagcgtcatcgccctggccggcacgcaggtcgacagctcagcgtcgaagagcgacgcgcccaaagagttcaatgttgtgcagttctacgacccgtttggccgccacttgcgctcgcttcgcgttccagggagtcgtattgaagcgctggcgtgggaaggaacgggtctccgtatctgcctggccgtagattcacacatctacttcgccaatattcgacccgcgtacaagtggggattctacgctaatacgctggtctacacgtacaaccgagcggaccagatcgagaactgcgtcgtgttctgggacacaaagtccgatgagcgctgcaccaagtacattcgcggactccttgcgatcaaagcggcgggggataactgcgtgctggtgaccaagatttacaatgaagatatgggcacaggcgaggtcaacgggcagctcgtggatgacgagcagggagtgttcaaggagatccagtaccagttgatcctttgcgacacgatcggatctcctatcgagagcaagatcatcgacttcgagccgattttcgttgctatgacatcgcgccacattgttgcagcttcaaccgatgccatttacgtctggcagtacaagaattccagcgccaagctgacgggtttagtatccggcaacggctcgaatcaagacgcgatggatgtcagcacaatctcgcagctattgcagcgaggaggtggtcgtgaaaaggccttttacatcgatgagacgcagggcaacgacgttgagcacttccgctacgttgctcgccaattggaagacccgatctgcgcgatctgtgcctcggacagttggattttcgcagctcgagccagcggtttgatccattgtttcacgctgcctcacatctcgctggagatgaagtacatcgtaaactgccgcccgcagttcctcgccctcaactgcaactcgaccttgctcagcgtcattgatatcaacgggttgctgactatcatggaagtcggggctgctgggagtctaaacaccacgcaggggaagatgctgaacttcgagaagaaggatgcgtgggatgtcgtgtgggccgaggataacccggagctgttcgtgatgatggaaaaggcccggatgtacgtgtatcgaggtctcgagcctgaagaacccgtgtcgtcgtctgggtatctctgttactacaaggatctgcaagtgaaggctgcactgctggacgaaattcttgcgaatccagaacaacccgacaagaacatggtgatcgagttccagacgcgatcgttgcgtgatgctaaggctctattggacaacgtggggctcgctgaagcgtgcgaatacatccaggaccacccgcacccgcggctgtggtccctcctggcagaagctgcattggatcagttggatttcgggatggctgagcgaggttttgtcaagtgtggagattacagcggcatccagtacgtcaagcgcttgcagctgctgaacgatcgcgtcaagcagaaggctgaggttgctgcttacttccaaaactttgacgaagcggaggcgctttaccgtaaaattgatcgcaaagatctggctatcgacctgcgtcaaagactcggagattggttccgcgtggtgcagctcgtccagtcgggcggaggcaacgatgacttgctgactcatgcgtggaatatgatcggcgaatacttctcggatcgccacaaatgggaaaaagcaatcaaatactacgcgcaagctaagaacacgagtgcgctggtgcagtgctactacgcattgggtgacttcaatcagctcgaagctctcgtgaacgacatccctgagagctctcctctgttgaaggaaatggccatcaagttcacacgagcaggcctttgccagtctgcagtggagacttacgtccggatgggggacgtcaagtccgctatcgattcttgcgttctcttgaacgagtgggaacaagctgttggtcttgctgagcagtacaacttcccccaaatcgaaaacgtgctgacgaaatacgcgaatcatctcatgatgaacggcaaaacactgcaagcgattgagctgtaccgtcgagcaaacaaaagtacggaggcagcgaaattgctggcgaagcttgccaaagaagttgggaagaacccactgcgcgccaagaagttacacgtcctagcagcgtttgaagtggagcggatgcggaagaagatgctggacatgtccaatttgacctccatgaaaggcacgacggcagctcaagtgaccgcgcagacgctggaaagcctcgtgcagcatgatgcggcgacgggtgaggaccgctccttggacaatccttggcgaggcgccgaagcctaccatctctatcttctcgcccatcaccagctatacactggtcgcatcgaacgagccttgcgcacctgcctcaagctgtcggcgtacgaggacatcctcgaagagcgcgagatctactcacttattgctctcaccgcgttctacaccaagcactacgaacaatgctccaaggccttcgtcaaactggagacgctccctggtcttgatgataaggagctgcaagcgatgagcgagctcgccctcaagatcttcacgaccacgcgcacagagcaccaagacccgaccatgcgcccccaggagtgccccaactgccgcagccacgtcaaagaatgggattcacgctgtggcacttgcagtcgtccgttcccgacgtgtatgatgacggggatgtccatccagtcccagagcacgaagacgtgcaaggcctgccgtcacgtgtgcattgaaaccgagattcgcgatcagaagaactgccccctgtgccacaccccgttctccttctagttgctaaggctatcatacgtggaggaggccaagtactattgaataactcaaatgaattccatgttcttccccaattgcagtagttctattcgtacgcgccaaacaaaacttggggtgccgttagttcggtgtcttcgaaacgaccgtcgagtcacctccattttgaagcagaataggaggacggataaacaatgaaggtaagttcttgcttcttgtgaggtgcttgctcttgaacgatgacagctgacctatcgctatcgactactgcagaagcccgcagctacagaaaagaagactgagggtgctgacaagaaggagaaggatgacgctgaacccgacgatgatgctgaagaggaggaagagggcgaggaggaggaggaagaggagagtgacgaggaggtagaagaggacacagggctgactgagaaccaaaaccgactattgtatctggtgtcgctgtattcgaagcctgccattcgggcctccgacaaggaagagtggatccgcaagcctgcgcttctggtgttgctctacgaagcgattgtatcgaaggcccttgactatgactacgcgccatcctctgagcttattgagaacaagcgcaagtacttcaatatctctcaagaaggcaagtccgacctcgatttcttacgtgaggaggatctggtgaatggcctcaagctgtcgtccaaaagctaccagccagtgacctgctttcagatctccgaaaagggcctcgaaattgtggcgaagatcagcaagacggacaagttagcagttaacgatatggcgtacgcacccggaacactgcacttgttgcgtgtggaatgggatggagaggaatactggctggtggatgacgaaagcgggtaccggcgactgtcgtctgtgaccgaaactgaggacgtatcgtacgtttccagtgcctatatcccgcagtgcctacgcttcggtggtcggccgacgctcagcaatgcacatcgcgcccatgagtgtggcgtgagcgactctagtatccgagaccagcttgacgagatcatcacgctcaattcagtgtcacttatcgtggccgagtacattcctttcggctccaatcaagttgtacaactgaactgcaacctgggatcaaccgagcgagtgcagggcgggtttttcactgcgatcgttgacgataatgcgagtggcacccagatctccgttgatcctggtctcacttcgatcaatattttagactacacgatgacaaaccacgtgaacttcgaggcggacatccacttccccgaagctcccggggttgtacaggtagaaacgtttggctgttcactcacggccgcaggctcttgtctgtacgggatgcaggtcgaagccatcatggatcgaatcaaagacaacatttcgcttgatcacttgtctcgactgctcgtggatgtgcacatggactcgtccaagattgtcgacagcgttctgtcagcataccaacgcgcgctactggggctcatcttctcgaaccaagcagccagtcgcaacaagatcaatctcatcatcgccaacgagatcacgccgcatttgacagcggaagagtacatggataaaggcgagtacgagaacgagctgaaacaggttattggcgatacccgtgcggctttcgacattagcgagcacgacacgctcgtctttggagcgcatggcctcctgatcgccggtcccaatagcagacaccacgagcctcttctctgcagtttcctccagtacgaatccatgaacctgttcacacagaacttcttcgcgcgcatgttcatcatcgtggatgacatggcccaagtacgcaagcttatcgagacagcagaaaaggatccgaataggctccgagaaattcgaaatcgacttgcggtgctctccaaggagatcattatgatggaggaaacgctgagctacttgaaggaatcgctggacgaagctattgtgccagcggagccaccggagcaggcagggcggagtctgtacgagcgacttcagctcggaattctgagcaaccagctcaagcgacgagtcaaagacctgcacaagaacatgggcggagctcgccatgagatgtcggtgctgaacgagatggcgaacatcgtgtcgagtgaaaaagatttccagcagaacgaggcgatacggatgcacacgcgaacgttgtgtgagcttcaagaagtgaacgagcgggcagcgtcgacgttgctgattatgaaaatgatgttgagtgggctactggcgtttaatattctggatcgagtcaccggagactggactgtgaccgacaccgactggatcaaaagctttgtggaggtcatgatctacaataacccggggctgtggttctttttcagccttctcgcgtgggtaattgtgggcggcggcatgctgtacttgctgcgatacatgagcttcaagtcgcagggcgtcgtatcgatcaaagtcgagcggaaagcgcctatacagctcaaaaacctcaccagctacctgcggaacaagatcctcgatgtaagcgagcacctttgcatgtatgcatagaattgtcactatccggactgacctggtgttgcggctgttgttgttttcgtgtataaattagaacgagacccaccactacgaaggggggattcgcgtggccaaagtggtctggagggagaaggacaagaaggaatggggcggtacagttccgtcgattgaggtgcgcagcgtaacctcgctattcacgccatgctatctctgacttttgatcgttgttgcagctggagtacgacgaggagaacgcgttcatgctgcggatggcaatctcgtacaaaaagcggcaggctgctaaggcgctcgcttttaacgccgacgagctgtacacgcgcttgatgcaggagctcgacaaggcccggatcttcgtagacgccgacagcagcgccgcgacgaaagcgtccaattcatcggccgccgccctgccaccttccaagtcgccaaataagaaggaagagaccacgtcaccgccctcggcacctacgtaagcgtctagaaaacgaaacacatccaattcttcgcttcaacttgaggcgaccactgaaatccttaatttgtgtatgggacacagttcttgtgtgtaattcgtgtgtgccaccgcgtgtggctcgagtcgctcacccgtcggttctggaggtgcgagccccatgttgacccgcggccagcgcctgccgcgacggctgctggagctgactctgcgtgcgtcctccaccagcagcactctcgccgtctcctccacgtccagacgcgctgcttctcgtcgcctatcgcccaccagaagcttcaggagcgtctcctccagtgtagcaaggcacgacccacacgtttcgagcttcagccgctcactgcagccccgccgcttctcgcaggtcacagccagctgcccgccagtgccgcaagacgagcatgaagagctcaagagctttttagcggagcctgcgacggcgggcgcggccatggagcgcgccaaggagatcgtgacgggctggatgcagcggcacgtggacccggccatgcccggccaggacgccaccgtcatggtgatggtggccgacgccatggaggacccgcagttcgtgatgcaggtgtacacgtgtctgcgcgacgccggcgtgtcgccctcgcccctgacactcgagtactcggccgcagcctgtgctcagctcggcctatggcgcacggcgctggagatcatcgagttcatgcaccaagcagtggagatcatgcagccgtcgctggacatctacgagaacgcgatcgcggcgtgtcataaggacaagaagtggatgaggaccaaacatcttctggaagagatgcgcacccacggcctcgaggcgtcaccggaactgcatgtggcgtcaatccgactgtgtattgacagcaatgaaacgacagctacgcgcgtgctcctggatgcgtttctgcgggcgtacgatgaagagctggcggaggaggagaagcaggaagtcgtcaccgagcttttccacgcagcgttggacgcgcagtcgttgccgcaggcgctcttcttccgcgacgagctgctggcgagacactttaccgtttcgaaggagctgtacacgcggctggttcatttgtgcgccgtaaagcgtcagtggcacaaggctcgtgtactgttgcggcagtttgtggatatcaacgctccaccaccgaaggcactgccatcgaacaagcatctggaccacatccaccgtttgctgaaggagatgcacgcccatgatatcgagatcccgttggcggtgtacaattctggactgcggcactttggacaagtctcgctgctagatgacgctaagctcctttatgcagacatgcagaacagcggagtgaagcctgatgctacgtcgtttgcagcgctgatgtgctcttccggctccaatgttcaacagtcagaagactactttcgtcaactgcagcgtaacaactgtgagcctacactggacgtcgtgcatggatatctgctggcacccagtcgtgcaaacaagtgggaagaggtgctaaaacgatatgccactgtccacgaggaagatcctttatttaaagatcttccgatggagtcggacgtgcgaattcaatctctcgtggcggttgcttatgggcgcgtgcatcgctcagaagaaatgctgcgtgtgttcacagcgatgaaggtgaagggcatggagccgaatctgcacgtgtatggtgaagcgctgttcgcatacatccgtcaggggcagtggcggcatgcgctgatgctgttcgatcatcttttccaacagcagacgcccgagatgcaggagaagcgagttctagagaatttccccacgctgtgggatgctgctgtactggcgtgcgtggaaggcgaggaaacacagcgagcggcgattctgtatgacactatcatcgagcagcgtgttccaatctctatggtgactggtgagcgtctcgctgcgttgctgaccagcgtccccgcagaaacgttgtggcattctttcaaatcgatatcgtcattgcatcgaaccaagacaaggagtcgattgaacccgcgagtacaaaacgcggtgctaaaacgcgccgtggatgaaaacgacagcaatctagctgagcaaattgtggtcgatggggtggatgatatgaaaatgctgcccaattccatgacgtacgcgctgatgcttcgtctgtacgcaaaccgagaggaccaagagaagtttcacacctggtggcgtaggatggaagatgccaacgtgaagacgactctcttcgtgttccgggcactgatgcagcatctaagcaaccttagcgtggaatgtgaggacgtgtcgtacttgcacgccatcaacagctttcttcagcgacagcaaactgaggggtcagatgcaagcaggattaccgtcgaaaacatcaaggaatacgctgcgaaacttggacgaactgcgttagacatcatggaaggtcgaggaatggcgcctgacacaatctgcctgcagtactatctgctgctcagtcaagaaccggaccacgtggctcgcgctctcgcgtttgtagaagattcactgtcttcagccaacggagatgaccaagacaatctccacgatgtcgtacaactcacgcctcggttattgcacacgctgtttacagcgttgggcaacttcccggatgaccagcgtgtgcgcagacttctcatcgacattgtgaaatacttgcctagcgatctttcagaagacgctcttgcggcttactgtgcagcgaatgatggttaccacacgctgcagcttttgcgcgaactgcttgatcaaaagtgccctcttaaggatgagcacgtgctgttcttccttaccaacagctacacgtgcgaggcgtcggcgttggaaaccgaggagtctcgtccgaggagcggaaatggtgtgatagtggacatggctgcgctgttgtgtgaaggcgagaccgtcacgatggaggcaggttgcctggccttccttatcaagcacgtcgtggacctgtccaaatggcagcagcgagatacgttcgaggtatctacgcaagaggagatcgaggctatgaaaaggctactggtgcgtgcgttctcgcatttctccatcgcccaggtcacagagtttctctccaaggtgatcgatagagacgatctcgttcatatcatgagtgtcctagacgagctccaggaggctagagataatcattagacctagagaaaccgcgttggtgttttgaaaacgaaatttatgaaatctaaagtgtctgactcgtgttgcatttcggaaaggtgattggtgcacttgtacttgcacttagcacgtcacgctccttcggttagtcatcactggtgacgagttcgcagtgctgtgctggaccagcatctgctgcatcgccggtattggttgcagctcttgactggcgcacttcgaccggtggacccagagacgtccacgtgacgtggacgtttccggtatatgtatcagcgacacttcaagggacgaaaagggtacactgcctgccccccgcttccttcgcctcctttgctgttcattcctgaatctgcctagcctcgctcaagtcccaagcttccagtcctccccgctaacaaccacccaccatggccaagatcgctatcatctactactccacctacggccacatcgccaagctcgccgagtcggccaaggagggtgccgagtccgtggagggcgtgaccgccgagatctaccagatccaggagacgctgcccgaggaggtcctgaccaagatgcacgcgccgcccaagaaggaccaccccgtggccacgacggacgtgctcaaggaggcggacggcatcctcttcggcttcccgacgcgctttggctcgctgccggcgcaggtcaaggccttcttcgactcggccggtggcctgtgggctgccggtgctctggtcggcaagccggcgggtatcttcttcagcacgggtacgcagggcggcggccaggagaccacggcgttcactgcgctgacgttcctggcgcaccagggcctcaccttcgtgccgctgggctaccgcgccccggagctcttcaacatggacgagatccacggcggatccccgtggggcgccggcactctggccaacggcgacggctctcgccagccgtcgaagctggagctgacggtggccacgacgcagggcaagtcgttcgctgagatcgccaagaagctggccgcttaagataaagttcgccaggaaatgcttgtcgttttgacattcctgcaacgtgctggttgtctccgcacgcgagagtttggtcgtcacagtgctgatctcagccaaagtccgtcaggccgtcggtaccggaacttccgataccccgccggcgcgtgcccgactggcaacgtaaccaattttatttaaactaagacaaactcgtagcagccggcgctgctgactaactaacaatacacgcacttcctagacacgtacgcaatgagcaacttcatcgccctctaaaccacttggacgtacaccaccgctgtgcccgtcctcacttcgcagtccacagaagactcggagtgccaagtgctctcctgtccgtcactcaccacgtcgcccagtagcccgtccaccgaagcagccgttcgttcgtcttgcaactcgctcccgagctgcgtctgtcgccgaggcctctgcgccctcgccgtctatttcaagagtgagctcgacgctcgaggtcctgagccccatgcccgccgcacacgtgcagcagatcctggcgaccgtgtggtctccggggtccgctggggttcaacgtcccactcgtccctcagccgctcctcgcattcgtcattcttcgccaggctggggttcaggccgctcgtctgacccaacccgtcacattcccattcgcgaatagagctgtcgacgtccggtgttatcgaaggttaacacccagacgtcaaaagtcgccaacggacgtctgatccacgcccccttgacaccacccgcttggtcactatttcgaaatagtgagatgccacttgtggggactgcttcattgcatatggcggctcgcattctattttgtggcatgttagctcgactaccgtagttgactacaagctcaggaacgttagattgccaccttctaagggatcggattctctacccttaggcctacgcgccgataatacacaggtagtctcagatagcagaactctcttggtcgtgtgctgtgccgcttgtcttgtggcctgatgcgttgtcagcgaactcacatcacctctaggttgtattcccgtgacttgcaggaaggctacaacttcgtggtgacagacacgccatacctagccgccaacgtggccaagttgatcgtcaactcagctgacccctcctctgagtaggcccgtacgacgtgcggcaatgaccgacagtcggccagactaaccagtctcgcgacactgagcgggaggaagagaacggcttcacaggtcccattctccctcatggagtcagaagccaagtccatcatcgacgactccagagacgcctgttcaaccatcggctcgtttcggtctagatgctgttgctgaaagtgcgcaagagcgtcaagcacgtggacgcactcctggccgacgtgaagctcatggcgacgctcgagcccgcgcgcagtgtcccgttcgcgggcatggcttgggactcactgacggacttgtgcgccgtctcggagattatggagggcggcgacttacgtgcgttgctgagtgtgtgtgaaaacaccacaggcttcgagctcagcaagttgacgatcgctcggaacgcggcgtacgtgctcacgtacctccactggcttgagacttaagtactgcatcgagacttgaagtcgataacgtccagctcgcctccaggctagagaccaatctcacagctaagcgagaagacgacgagatgacggccagcgttggcatgtcgcagtggatggcgctggaggtggtgtgtatacgtcgacatgtttgtggtcgtagtgtgttggatcagcatgtcatttcgtattcacacgcaaaaggctgcggggatattgacccagaccacaaagtctatgaggtggccatcatctagatggtggcgctgtttagttttcatcaggttagttcaatcgatgccggacttgtgcacggcttgtgtgtctctggatccgacggaatggcccaaaattgcagaagcgctctaccatcttcattcaatactatcgcagaagcaccattgaaatgagttacatacatgaagaagtttcgttatgaagacacatacaaacattatacatgttagttacagtgttgtcatcactaactagatacatatcatgctgctccattttgagccataaacaccatatcccgaactgtgctagccttcagcgaacaacgtcgttttgtaactgtgttacctgcagtgataaacgcgcgctctgagggcaccgatgtagcgatgcatccaagtcacttgcgagtaagaacagcaatagtcggaaattttgaatggttctgcttccaccacgacaaggccgatgggggcttgtcgggatctttgacctccgcctcgctcgactgcttcaagtagctgcttagctcccactcgcagtcagtctttaacttgtcgtccgtcgcagctgatgatcttgacgttcttgatccgtacaacatcttatggaagctctgtcgagcgcggtctgtagcatcagtcattcgcttttcagggctttgagaacgagcggcgtcgttgtgaaccacagcagacttcttctttagcacgaacatctcatcggcaaactgctcccgcgccttctcatattcatccgcagtgaaaatcgccgaattcgtcatgtaggggtcaagcaacgatatccacaaaaggtcggggtctgcctccttatcaaaccgctgcttcaacaaggctgaaaagcttcggcggacggattgcatgatggatagcacttccattgcgtatgcctccttctcgacacttgtatagagaacatcaaatatttgttggttgtccagcgatcgtttgagtgaagagatgaaaagatgaagagatatcagcgtaggataggtctctccatcgagcatagtggtggtaacgctgaacggggccaacagctcgaccaggcactgaatcatgaaccactgcttggcacttggaagcttcaacttttttgtagatcgattgttaaactccttctcgccttcttccgacttaatgtacaggaaaaaactttcaccgcaggctgcaaatccaaaaagcgctgaagcataaccattgtgctgttccatctcgtcgggtaatcgatcaacacttttaggggctcttttcgagtgactgcagctcatctagtcgattgcgagccttttgtgagcgatggaagtagtccgccagctttcggaaccttcgaaccgttttgcgaaccagctccatatcagccgagctaatttccatagccgccgatttctcggcttctgcaacaaaactggcaacttccccgcaaagcgcatcaatatcagcttcactaataaactcttcgtcttcaccgtcgtcgtccgagtccgggccattttccaaggcatccagctgctcatctatccactgggtttccgtttccacatactgctcactgcgcacacagacgtcgttgccgagagtactgccaacttcgccaggactaacaccggtgctggcaccatcagtaactgctatcgccttcttgcgttcatctcctttctgcagaagcgccgcggctacaacgaggtgaagtgagtgcgctgcgcatgatcgatgattgagcccaaggagggtgcatccacgtttcatgttcgacgcagcatctcgtagaaatcgaacacacttcttggggtccagacgccaccacgcaaagcaacgtaacagtacatctgcaatggcttctccatcgtgttttccaggaatagaggtaacttcaagtgtccacgacttcatgttgaacaggctgtcaaggtagtgaaccgttaagcttataaagctttcacactttatcgaagtccaaatatccgacgaggccgaatagaagtcacattcgtcgtcgctcaccagcatcactcgcagtgacaaacggcgctctgaagcattttcgtggacacggagcgcgaccgtttgtctcgacgggatctcaagaacagtggttgcgctgtttgcaaaccttatcgccttcgcgaatcctctgtcgccgatgatacttgtaggtcgcaaatccgtacccacccattccgacaaaatgccctcgaagaagctctgttccgattcatcttctcgttcaaacaagttcaccagttggttcgattctttcagggctgcttcatgccgctcattttctttgaaagcccgtaaggcctcgatgtgggatttccgcatgtgggggccaaccaaactctttcccttcttgatggaaagctcctccttgcatccaaagcaataaaaactcttggcgtggtcgcgggtgaggtcttgccttggaatatctttgtacttgtcgtctaccacacatacgacgaactgccagtacgccgtgtcccgctgcttaggggcctcaaatgcccttccagccgggcaactcgtgacgcctttggcggtcgggacctgttgaagttgttcgtgtgagcttgagctgaaagctgaatggtttaaccgggctgcattttgcatgcgggtttcggatggcgcagtcagccttgcacgcgttggtcccgacggggtacttgtccttgaaagagctcctcttggtgtagttgtcttggatggagttgggcgtcttcgtgctggtctccgcggagaggtttttgttggagttggttttcttgcctttttccgaggtggctttggcgacgacgctgggcggcttcttaaagacgacgctggacggcttcttgaagacgacggtgttgcgcagcttcttggaggggggctagccaccggccagacgtggcctcgcatatcggaatgagcttccatgctcacaggcccgtgagtgtggactttggtctgggcggcgaattggaggatgaggccgacaacagaccactggtcgttgatctgaagctcactcacgcaggaaatggacggcgctccggcatttgagatcttgtccatcccgaacacttaatgtggcgcagcttgcttcgtgaatgtggcattgacgagctaagacatggcgtgcttctgattggcgttcaaacaacctttttggccaataatatggcttaattaggtagggtgtcaaggcgacgtcgataacgacccttcacctaggtgttgctgacgtccagtcgacgtccagaagcccggacgtcgacagctctattcgcgaatagaagaaaagttgtttatcgatttttgttgctctttggtgtttcttggtcgcggagggtagtccctggatcgtcgcagcaaagtgctccccacatgtgaagctgcgggagggaggcgttgctgggttgaacgagcggatacgccttccgcaacatgttactatcctgtagggcagaagctctgtgattctgctgaacaacgcttgtccgcatttcggggggctggacggctgtatgcgtcccaaatgctcccagccccctcctataagatttacgcgtcgcaactggttctgtaatctgcatgcgattaaggctccaccgaagccaatgcgagctatagatatagagaagttcataccacgcgcgccgaaacagcctgtgccgtagtcacgctggaccaccgcacgcggcccttgtgcaagtacgcacgcaagggagggaggggccggtcggtggctgagttgttagccgcctcgtatgcaggcggttcgtcagccggactcgttcagtgcagtgcagtgctgtgctggtgttgcacgttccgcagtctcacttcgacttcgacgcagccaatcagcgcgcggctcggatgtctacgtccgagttcaacgacgtaaacagcgccatccagccaatcagcgcgcgcggtggacccaaaaacgtccacgtcacggagcccatccccagattgcgctatcattgtgaggcccaagcagaacagagagtgggccgtggccctggtttaaggtggcgcacaccaccgttccggcaggtgccgccgttttggtacaacgcatacctatccggctcacctcaaggtcgccgtggtttctgatgacgtcctccctcccagctggccgcggctctgcgagccccgtgcagcacggcacggcaccttgatctccgggccgcgggcgggggttcccgcggcctccgctgcatccaccctctcattcctcaatcttctgtctccgactcaagtctccgaaagaaccccaagtcccagtcaccatggccaagatcgcgatcgtctactactcgtgctacaaccacatctcgacgatggccgagaccgtcaagaagggtgtcgagtccgtggacggcgtgaccgccgagatctaccaggtggccgagacgctgcccgaggagctgctgacggccatccacgccgcgcccaagaaggactacccgatcgcgacgccggacgtgctcaaggaggcggacggcatcctgttcggcttcccgacgcgcttcggctcgctgccgtcgcagatgaaggcgttcttcgactcgtgcggcggcctgtgggctgccggcgccctggtgggcaagccggcgggtatcttcttcagcacgggcacgcagggcggcggccaggagaccacggcgttcacggctctgacgttcctggcgcaccagggcctcaccttcgtgccgctgggctaccgcgctccggagctggcgaacatggaggagatccacggtggctcggcctggggtgccggcaccctggccaacggcgacggctctcgccagccgtcgaagctggagctgacggtggccacgacgcagggcaagtcgttcgctgagatcgccaagaagctggcggcctaagcacctattgtatcataagcgtgctcgcaactggtggttaagtaccaggactagatgtgtgtaagctaggtagcggttgctgcactattgcatccgcgtatggtagctttccattctagaacattttgtttaatacagttgtcgtttgctgcttgcactccattgccgcttgtgctgatttggttttgcgctggtgcattgttgtctctgaatcgtggtgggctaagtgccttgctccgctgatgctaggctacccgtagcaggatagagaagtactgcgtgtagcgctgttctgttcggcgaaactcagtgtgcaagagtgatagaggagtggctccggcatacctacctactacgacgtagtacgacgatctttcgttgaacatgtagctcggcgtgcggttgctgccagctcaattgatgcagttatcggtagggcgatttcatgagcaagttgcatgccgcttgtatggcacattgagccgccgggtcggtctgctttgagcgctctccgagcttaaaagctacttttacttgttctctagccgacgtagccatgctgccgatgcacaaacaagctctgccacgtcagagttcaccttcggatactcactgtttcacaatcaccaagtgccctagccacaggctcgttatcaggcccatggacctctgcgagttcgccatcgtgtcacaagtgcgaagaaaccacagcgctgctaaactactatggacagggtgcgtttccacgacgtgaaagctccgcaggagtctcgagcgcaccaaacgagttcattattcaattgtcctcgcttcgagcacatcaaacaacagcagcaacaacaagcaccaccaccaaacatgaccaacgtcgccatcatctactactcgacctacggccatattgccaccctcgccgagtccgtcaaggccggtgtcgagtcggtgtccggcgtcaaggccacggtgtaccaggtcgccgagaccctgtcggaggagatcctgaccaagatgcacgcgccgcccaagaaggactaccctgtggccacacccgagacgctcaaggaggcggatgccattctctttggcttcccgacccgctttggagcgttccctgcccaagtgaaggctctgttcgactcgtgcggcggtctgtgggccaagggtgcgctgattggcaagccggctggcatctttttcagcacgggcacgctcggcggcggccaggagaccacgtcgttcacggcggtgacgttcctgacgcaccagggcatgacgttcgtgcccctgggcttccgcgctccggagatgttcaacgtggaggaagtgcacggtggctcgccgtggggtgccggcgcaattgcgggtggcgatggctctcgccaggtgtcgaagctggagaaggcgatcgcgacgacgcagggcaagtcgttcgcggagatcgccaagaagctttcggtttaggatagcaagatcgtgcggcagattgagtagagcgagcgtcgctaacctacgttactaggacggaaccctgctgcctactgtagatccgtccgttagatttacccttaccacgaatacaactcgtgttccccgcattcgtagcatggatatcttgctttatcagaacgtgtgtgtgtgggggggggctaaccttatgctgacgaaggccgtgctgcgaaccatgctgaacaagcgcactcatcacgtgtttcgcttcaaatccaagtctacctgaagctgtacgtgcgctcttggtgcgccttccgtgcaacctacaatgtacgcaccccctaacaatcgctgctctatcgcgcggaacggcttggaacgttgagaacttctcagagaaggtttgagggaggctggcgataatggcatgctgctcagacaacctgctacagtacatgtttcggaggtgtaggttgcgacggccgttaaatacaattgttttatcctcaaggcatgagggcctcatgattgccatgagcctcacgatgaggctcatggcaatcgtcaatccccttgatttgattatcagggcgtatctttcgtccgtttgccacgtcagtgctcatccccctcgattgcataaacagcaaatctgaaacacgttatcaaatacggtacacacgccaagcaaaagatacggtacacatgaactgattgccgattgccatgatgacaaagcatccaaccgctagccggggcccagccttcatgctgcttcgccgcggcatgcaaactaataacaagctacctgcacacgccaacgacctccccattcaggccttttcaaattgagaatctccaagccgttccgcgcgatagagcagcgattgttagggggtgcgtacattgtaggttgcacggaaggcgcaccaagagcgcacgtacagcttcaggtagacttggatttgaagcgaaacacgtgatgagtgcgcttgttcagcatggttcgcagcacggccttcgtcagcataaggttagccccccccacacacacacgttctgataaagcaagatatccatgctacgaatgcggggaacacgagttgtattcgtggtaagggtaaatctaacggacggatctacagtaggcagcagggttccgtcctagtaacgtaggttagcgacgctcgctctactcaatctgccgcacgatcttgctatcctaaaccgaaagcttcttggcgatctccgcgaacgacttgccctgcgtcgtcgcgatcgccttctccagcttcgacacctggcgagagccatcgccacccgcaattgcgccggcaccccacggcgagccaccgtgcacttcctccacgttgaacatttccggagcgcggaagcccaggggcacgaacgtcatgccctggtgcgtcaggaacgtcaccgccgtgaacgacgtggtctcctggccgccgccgagcgtgcccgtgctgaaaaagatgccagccggcttgccaatcagcgcacccttggcccacagaccgccgcacgagtcgaacagagccttcacttgggcagggaacgctccaaagcgggtcgggaagccaaagagaatggcatccgcctccttgagcgtctcgggtgtggccacagggtagtccttcttgggcggcgcgtgcatcttggtcaggatctcctccgacagggtctcggcgacctggtacaccgtggccttgacgccggacaccgactcgacaccggccttgacggactcggcgagggtggcaatatggccgtaggtcgagtagtagatgatggcgacgttggtcatgtttggtggtggtgcttgttgttgctgctgttgtttgatgtgctcgaagcgaggacaattgaataatgaactcgtttggtgcgctcgagactcctgcggagctttcacgtcgtggaaacgcaccctgtccatagtagtttagcagcgctgtggtttcttcgcacttgtgacacgatggcgaactcgcagaggtccatgggcctgataacgagcctgtggctagggcacttggtgattgtgaaacagtgagtatccgaaggtgaactctgacgtggcagagcttgtttgtgcatcggcagcatggctacgtcggctagagaacaagtaaaagtagcttttaagctcggagagcgctcaaagcagaccgacccggcggctcaatgtgccatacaagcggcatgcaacttgctcatgaaatcgccctaccgataactgcatcaattgagctggcagcaaccgcacgccgagctacatgttcaacgaaagatcgtcgtactacgtcgtagtaggtaggtatgccggagccactcctctatcactcttgcacactgagtttcgccgaacagaacagcgctacacgcagtacttctctatcctgctacgggtagcctagcatcagcggagcaaggcacttagcccaccacgattcagagacaacaatgcaccagcgcaaaaccaaatcagcacaagcggcaatggagtgcaagcagcaaacgacaactgtattaaacaaaatgttctagaatggaaagctaccatacgcggatgcaatagtgcagcaaccgctacctagcttacacacatctagtcctggtacttaaccaccagttgcgagcacgcttatgatacaataggtgcttaggccgccagcttcttggcgatctcagcgaacgacttgccctgcgtcgtggccaccgtcagctccagcttcgacggctggcgagagccgtcgccgttggccagagtgccggcgccccacggggatccgccgtggatctcgtccatgttgaagagctccggggcgcggtagcccagcggcacgaaggtgaggccctggtgcgccaggaacgtcagcgcagtgaacgccgtggtctcctggccgccgccctgggtgcccgtgctgaagaagatacctgccggcttgccgaccagagcaccggcagcccacaggccaccggccgagtcgaagaaggccttgacctgcgccggcagcgagccaaagcgcgtcgggaagccgaagaggatgccgtccgcctccttgagcacgtccgtcgtggccacggggtggtccttcttgggcggcgcgtgcatcttggtcaggacctcctcgggcagcgtctcctggatctggtagatctcggcggtcacgccctccacggactcggcaccctccttggccgactcggcgagcttggcgatgtggccgtaggtggagtagtagatgatagcgatcttggccatggtgggtggttgttagcggggaggactggaagcttgggacttgagcgaggctaggcagattcaggaatgaacagcaaaggaggcgaaggaagcggggggcaggcagtgtacccttttcgtcccttgaagtgtcgctgataacgggccacgctgaagctgaaacctgtgtgatctagtacaagttcataaatgctggaaaaacaaagtagattgacgcgtaaatgcattcgattaagacctacgagaacacgtaccctgtcctgaccgatgcaactcacagcaggcatctgattagccaatcgagcgatccagtgtgacgtggcaccgcaggttcacttgacgccccgccattggcccagttgcagctattaaaatagcaggcgctgacaggcattccccaagttctgcttgacgatcgccgcttgcagcatcgagctctcaagcttaaagcccaagggggcgaaggacgagaaaaggccttgacaaaggtgtgtttactttaaagaggtgtattgcctggtgagcgagatcaagacgcttctatagtacacacgaattgatcttgtgcgttggtcctgtgcgtctaggccgaccactttttggcgatctccgcggacgacttgtgcgtactgtgtgtactgtagcaggctactgcgctgtcattgtccttacttttgtggagatcaagctgagtttcgagaaacgagaaatgtgcttggtttttcgagtacataaacttcatttgagctcgcgcactgcgtcaacttgcaactactgacttcactctaaaggcgccatttgtttggatggcatccatgagcgggagtaacgtgctccaagcaacttttcttctgttttctgctacatgtcgctcaaatttctcattagcttgctcacatccgcagaaatgtgtcgatgtgttacactccaggtacattcgtactgtatccttctctggtttcgtctagggtggcgatgccaaagttggcgtcttttcttaagtacaaataaaaaaaaaattgcgattactcgaagccatcaaaatgtgcttggaatcaagtagacccaccgcgttgaacgcgcttcattcatgtcatctgataaacattttagcgcttcagctgccggtaagtacgtgaaaggaatacacggtatgcggggttgaagcgtagcaaaataggtgttaatcgcgaaaaggatagcatgaaaaattattttcgagcatgctgcgtcttactaagtgttcatgtactacagccaggtagacgtgtgcacgaaagtccccacaaatgcactgaagtacttaagtgcacttttggggcacctgctggagattagagcgtgcactaaagtactttagtgcatttgtggggactttcgtgcactgcactaaacaggtctacagccaggttatcacgtcgaaacggtcaaatatttttcggaggacaattccacaagtactgttgctgtaaaattatgattgtttgatccttgcagcagctttgtgaggactactgatccctgtttgacttgggccttcaaaggtaaaagtagaagtgtattcaagtgaagagtggggggaggacactgctcctatcgtgtccgctaccaagggtaccctccttggctaggaggtgttcctaagatactcgtagactgttcctaagacttggccgtttgttcagactatcagtgagctggcagcgcggccgctgcactggtaacaactactaactaacacgttcataaaggcgatgataccgtaccgcaaccgccaagaaccccccgtggtgatattttacgtagctctgactacctgtgtagagctctagctaggtattgttcgcgagaagcgttcacgaaatgaaagccgaaaacgtgccatactacgtgggtcgaattcgccgtcttacaccgtactaatacgattcaggcaaactccggacgcctcatgccagcgctcggtcctatcgacgaatcactttcagtttgtctcgctacgagaatcaaacagcaccagcaacaacaataacaacagcaactacaccaacaagcatggccgaggccgccatcatctaccggtggtgacgttcctggcgcaccggggcatgacgttcctgtcgctgggctccagcgctccgaagatgttcaacatgaacgagaatccggcgacattgccggcaaagacggctttagccaggtgtcgacgctgggcaaggccattgcgacgacgcagcgcaagtcgtccgcggagatcgccaaaaagtggtcggcctagacgcacaggaccaacgcacaagatcaatttgtgtgtactatataagcgtcttgttctcgctcaccaggcaatacacctctttaaagtaaacacacctttgtcaaggccttttctcgtccttcgcccccttgggctttaagcttgagagctcgatgctgcaagcggcgatcgtcaagcagaacttggggaatgcctgtcagcgcctgctattgatgggttatctacccttccgcaaccggtctcttgtcgataagaatccagtcgacaaataacagccattgcccctttttagccaataataggttagtagcacgcgcaagtcctttcacagcttaatgcctcagaagtctccctcaacctccctcgtcgctcaagaaacaacatgcgctgccacagaggcttctgggcctacgcaggcgacaaaggcaccgacatctcggacagcgctgcacgcttcgcgcaagagcaagcctctcaagcggagccaggtgccaacaaggcggcagagaattggctgcgaacgcgggctggaagggctctgaagtagcgctgggagggggagacagctacgattcggcaggactacatacagaagaaccctgacgctaccttttcgctggacgacaacccactgggcttcgcggatggccggcaggatcgccggcgttatcctcgaatggtgcgagccgacatcgctacgcctgaggtactgcaggaagaggcaccggtagcaccagctacgacacgcacacccgtcgacactcagtgtcgagaacaagttggtgaatttaagcgctaccaggacgagctgctgcgggctgcgttcgtggccgaagtgacagcgcttgcgcacgcagtccgagcgaacgacgttagccgagttgtgtcacgttcggtggcagtagaagaatgtatgggcgtccaaattgcagcaagtttatcccccgattcaagagctcgtgttgtgggagtcattcgtgacgtgacagcgtatatgcaagctgcacgaacacagttgactatgcactctgatgaagaggcggatggcgcgcttcatgaaacgcagactagcgcagctgccgctaactcagcactgagcaactacgtgcgtgataccattcaagttaacccagacttcaaggccatgcacgagggcaggggaaactacacgaccagcagcaccaataacttgcaggagttatattggctaggaaacgtatcctcggtgcaaactttgcaagctagtccaggctcaactgctgtgtcaagtgatgcatcgtctacatcagctacggtgggttaggcaggggcgtctgtcgagagactcaatggatcggttgctgagggcgcggctaatagcagcaacgatgctcagatatcaccctcgactcaagcaaaacctaccactagtacctctcgcaaatgcccccggttgctcgaaggaaagcagcgatccgccacgacaaattcaaagccacacgcaaccagcggaaaagagcaaccggctggtaatgcggcagatgatgaagatagcgcgtatgagccaagcaatgcggaggaaagttacgcgaatgatgacgatgtggaccccccccccccgaatgggcttttcagaaatcgcgtgtcaaaaatgatcctctgatagtgtggaccgatctcgaagatgacgatcacccccgaacagtgcatgtttaccctgtggatttggatagcttgcagactggtgcttggttgacccaaactgggctggattattttatctgtcgctatatggagcgagttaaaggattaattcgcgtatgtgactcggagttgtacgtattgatggagactgcacgattcacgcgaaagtcgaaacgaagacgccgactgttggctgacctagtcgcattgtttgactggtcggcctaccagtatgtgcttctcccagtatcgggtcgcaaccactacagagttttggtaattgagaaccccatgcacccgggaccaacaaaagtttatcacgtcaactcggtgaaaaatgctcacagctcggcgtatgcttttgacgttctgcaatgggtcctatcagagacccataaatcccaagcagaatcttcggctccgtttgagtggagcacctttgtccatttgaccaagccccagcaatcaaattgcatcgactgtggagtttacgtgctccattacatggatgtgatttcaaaacacattgcagccgagaagcctggatcgatcgaggtgaagatcgccgcgtggacagggggtgatttcggcgtcaagaaggcagcagcataccgagctaagttgtataggactatatctccagcgtgattaattgtagcacccggtgagtagaaacacaatcaacttctttttaacacggttccggttattgacgctatggctcaatgtagcaagtatcggaatatgtagtaccgcaaaaatgcgctatggtactgcaaaacatcactgcggtaccgcactgtaatactgctgtaccgcatgcattgcgttaccgcgtgggatcactgcggttcaaacaatacccacgggttaatagaaaggaggtgcgttcgtcatgtttttctatggtcgatactcgaccgcttggcgatattctcaagtgcgacttgtagtacttcatcctgtatgtattcaactagatttagcgttgcttcactgttcaaactgtgattcctcgcgtgtcatccgtaggactacggtgaacacatacgtccgactattgacgagttctgaaatattgcaagatacggttggcatcgcggagtgtggtctcaatcgttggggctgggatcggagatactagttgtggaaacggagcagcgagatacagcaatagcttggacagcatctttgatctcgcccgcatgtttcgctatccagttcagagatttgttgtgggtacgccggtactcctcgaatacttgcacggctagattagttgcatcgacgtcagacacccgagccgacgtgagaatatcatctgcaaccgatgcgactaagctgtaaattggccgccttctattgaagaaccgtcgttcgtccgcactacaccactttgtgccaaactgatcctcgagatctcggacagctctggcgccatctaagccgaccgaccattctttccacaagtccggcacagtagccaacccccaccaaagtttatactttgtccgatcactttgtacgtcaatagctatcagcgaagctgacggcactacatgagcggtatcgccgtcgccttcgcgcctaccagatagaacctggacttgtacaacagcagtgccgccatgcagaggtgccaacacgcgcattacgtcactgaggctaccttgaaccgtccgcatggtcgagcagacttgagctaaagaactcttgaaatcctggtgtagcccgtcgattttggcgtttaacaccggtacagctttctgaagacgctgttcgattggatcttccattgcgtcaacagcttgcataacctcacttttaaattccgtgaacccccgggattgtaatatgctgtgctgccaaattgggtgcgttggtgcggatttctgcaaaaatacagcatcctggaggacgaccttacggagatattggagcaactcgagaaaacctccggtcgcaagcgattgttccgctgttcctgaagcaatggcctgttgccaaacctccacctgcggaaataccatactctgcaatgctagcgggggatcaacagaagctcgggcaacaaaaagctcccaatactcggttcaaaaccggcaagtgtgcgcatcgcctacctcagaagagatgtgaggtaacatttctccattgattggccgttccatcgacccaaaggacgaatctgggactcacttgcccctcctaagtccgccatacgcgatccggatccacagccaacgtgagttttcgctttgctgtggacgccgacatgtttcaacgccgctgtgatagctgcattgtgaactttatacgacattggtttcgtggggtgtttacctgttttcaagagctttatcggataccagcgctctgaagacgtaaagtcgggaaatgcctcgccatccacatgccaacgccaaaacaagtaaaatccaagaattccatgggggcagatctcgacatgcttattgcgcgtacaagcgccgacttcaatgcgccccacttggttggttttatcctgtcgcatcaccataaccagagccctgcatgacgtgtagccctcgttttcgagaacaatcgagtgtaagtctgccaattccatcattcgcgccgactctcctctcataagggcgttgtggctcagtagaaaagcaaccaaattccgcaagtttttgtttgaatcgtgtgccggtgtccagaaataccgagctatctccttaacttgatcgattgtcgtatagccatccagtagtgtatcagctccacggtcctcaacatttttccgcttcctctcgtcttcttcgtactctgtcaacttcaatagggtcgtcacagcttcgtctctgggggagggattgctgttcactttagcccaagattgctgtttccataggtcaaccatcgcagcaacgtaggagttcatagtagaacgtccgacggtttcaattctgtcgctgggtgtacttccactcttgtggcgcttggtccggccaattacgcgctcttgtaggaagagatggagcttctcaccagtaactgtaaaccgggtcaggttattaaatgctgctcctttttccgagcaccagtctaagaactcctgctgccgactgctgtatgctctctgcgtgttcttaggtcgaagggtagcggccttctcgtaggtccgctggacagactccttcagggcgacctgcattcgaatctctgcctccgtgctgcccattgttccaagctgccccctgcgctcgagtctcttctttccgtgctggcttggtgcgcgtctagcggcttggcccctagccgcaaaattatacgtaattttgcccaaccagcatctagaagacccctcgtcaaataaacagttatttcatacccaaaacgtgagataactacaatgatttgatcgaaagccaccagtgctgaccggtcccggtccggaccccagtggtgataattggggcgaagcccccctataatgaaattgctctgttttatcgctctgatttactttctttcgatgattttatggatagggctaaggaaaggtttaatggttgcctctcccaggggcaaaaatgctgcattttacctctgtataagatcctttcaggctcactgtccgacggttccgagtgactattcatagaagttcaggggtttagcctacagcaaagggtgcgaaagccattaaactgaggcccgtcttttaggaggccccttctaaatagggtatatatgggctgtgggctctggaaagtggatttggcgtaaaactgcattgttttagctaaatggatactctgttttgctaaacaagcgaccctgttttagcttcggaaacgtgctgcgcgaaatagctagcttcgttgaggcttgcatcggctgcaagacgctagctactccgtggagccgtgagcgatggcgaaccatgcacagccgtcaccgcccgccacaaccttgtcaccaccttgtgttgtcgacacgccttcacggaccgtcttcgggcgcgccaagtcaactggcctgctccgtgggtgctcgtagacacgcacatcgaggaagagaaccgcgacaacacccaccgccagatccccttgcaattcgtagtagtatccgccaagcgatgactactgtgccgctgctgcttctggacgtggctgatcgaggtcgcctccgagccacgtcaatactcgctcgcagcccatattgacggccgaccttcgagagtgagactccaaccgaatccaaccatgaggcttgccttgccaggttttgttttcgcggtgcttgtacccaatgtgaacttgggtcgacttggacgcctcgccaacatgctttctttttattatcttggcgacatatcgagattgtggaaaagtgctatcgtcttcatttactttagaaaaatatttgcatgaagtgtagtttggttaacaagatgaatgatgcgatccctttcagtgtcaaacgatgatcgactctctggggacgctgtgagcttttccaaactcaaacgatgcgtaagaactatatattctctttttctaacgcgggaaagagcaaggtaagcataggatgcatttggcagtgaattggaatgaaatacgacttttgagcatgtaaccccttgaaccttatgaatcgtcatagcgtaggcaagccttaacggaatggcacagcgaacgactttaaagtcactccttgtacttacttccccagctcgtttcctttgaaatgatggggataatgttacgtacgtttggtaaaaaggatggaccaaagtattcatcaactatttcaaccaaaacgataggaagttctgatccagacacaaagatcatgtcgtacacagtagcgttcgttccattgcatagccctgctgtttgctcagcattaaatgttagtgtgacaggagcaccaattgctaaattgagttggattggtacaactcggtctctccttgggatcttttcttgtgcctgatctaaaagagctttaactgtgccttgaggtacttctctatttgcgatcaagcgtttttgcttcacattgtgcacggactttatgtgcacaattggagaagaagcattctgcaaatttacgtcattagcactatcaacatcagcgttaaggtatgcaatgtgcttcgcagcatgcacccactcaggcgttgcgttggttttgaagattcgagtattaaccccttgggtcccgggatttaggcaccgaaacacgtaatctacggtactgtacgtcgtaacttacgacgaaaaaagtaactacgagtttgtattggcgcgccctgtccgcaacaagagaagccccatcagacatattagattgtagagatctatgggggggaacttacgacataagagtcgaaaacgacgcgaagtacgccggaacttacgacattgaacgtagatcgagtgcatactagtcccagatggtggatcaataggattggtgaactacacaaaccattcatctttcgcggtattgatagatgactgcgaggttgtaatcaccaaatcatcgatatatagccaatcaaaacattttcccggcgaaaccgaagtatacgtcgcgcttaagttggttagtctcgtcatcttaatttagttattgggagaggtcattgtgggatatacgcacgatcaaggttatttactcactactccatgcccttgcttccaatccggcatttacgtggcgcgaaatacgctgcaacactgtcgctgccaaaaccagctacaccgtacagttgttataaggctgcaaataaatatttcttcgtgttagaagtctcggcagacatagtctacttccggttatacttactttgtatcttcggcacctaaactcgaggaaatagcagcaacagcccttggagagttatttaggcgccattccatccatggttcttatcatttacttgtttattgtgtgttcgggcgtttagaagctattctacgagctcgtgggagctcttgacagccgcatacgccgtactctcccattcaaggtcgctgctgtgtttgcttgaaagtgggcactcgcgcaaaccttaaaaggggatgctcgtctttctctatacaaaatgccccattagccagccccggcttatgcacaacccatctctgatgacagcactatatccgtgtttttgtgcaattctaatttttacctctcttgcttttacttttgccgacgaaaatagacttgattaaagtattgcaatctcgtttcgagccaaatgctaatgttaatcgagctatgtcgtattatacgacattgagactcggcaaagtcgtaacttacgacgtcgggaaccaaggggttaaaaaggtcaatgtcctgttgtgttggtactctttctcgcaatcttcgtagcgcttcaaaccattccgggtcatccttccctctatgttgactgcttaacgagcatacgcatttaatttcctcccaaattccgcgtcctttgcgctggatattgtcacgtattctatctgtggatgtcgctagagagtaaggggttacaggatccaactgggcactgtctcccgtgaaaatggcatctcttccaccaaatcggacctcgcgctgatcaggccatatctctcgcattctttggtctatccaatatagcattccacatgatattacgctaaattcgtcaattattaccaggtgtatatccctgaagcgctgctgtagagacaatagcttagctgggccgttttttttgcgtggtcattgcgacgtaaggtttggaaaatctttgtttgtgaccgggggattgctgtaaattgaaatgaaatgcttctcgctgatttttgcccatggccgcacatattttgtcctaaattcgcgtgctctattgatgtcttcgttagagtagttgtgctttggcttccattgagtatgaaggtctgcaataagttttttatctctctcgatttccatctcatgctcattgaggtgctcatcaggttcttcgatgaaaacatactcggacgggggcggattagtgcagcattggttctcgcgagaattcttcagacgatttaattgacattgcctcgttacctttaaattcacttcagttcggagttcattgtcgaggtttttattttgttcgtcgtagaaccgactaatacagtcatcgtcagtaatcggtaagtcgcttaagtgtctccaaggaacgtgtaaaaacaactcagcaaaacaaaagttagggtttgatgtgtctggagccatccatggcgacatacgaagaacttgggcttttcgacgctgtcgtaaaaacctagattatcgattcgcttccaatacttcgctgttgaggttgcgctttcaactacctcatactgctctacaaacctagcatatgacatcgacttaaacggttcttcctgaggacgcgccatgtaggctttttcgtatgattcaattttaatattatcgagttgaggcggtttgtcgatgcccaagttccgtaaggcttcggtaatatcgcaagtgatgacgcaaaaccttcactcggcttactttacgagacttaccatacatttttaattctcgaagcagtatgaagtaagcttcttgggcacttacctcacgaacagccaatgtggcgttagctattcttttaagaatagcgtagtaagggagattcgggtcacatcgcttaacagctgcagcgacagtgcttcggaagcgcaatgtgtcaggttcggctttgctcacgtaagcagcagtatattcggcagcgcagtacgcgtttcctatcatctgagtatccatgtttgcgcgccaagtcgaaagaattattggcgaaaaattgtttaccgagggtgagtctctatttaatagtacttttaatgacggggtaccgtcaggtgcagtttttacctcaacttcagtgcgaggatgaagagttttgggaaagccaaatctacattcgtcggctttctttcgacaagaagatccactgtagcatacatgttgctgcactcggcgagctaatcgggagatatcgcatgcccattcatctgaattgccacatggcggtcgcattgccaaaatatcaatgcttgcagaccgtgatgacttacagacggagcactggcacgaatctaggtcatcgagcgactttatcaatacagaaatatacttgtcaaggacatcaggggcatcttttatccacaatagtgcatgaatatgaggtgagcctctttgctgaaactcaactcgccaaaagagatcaataatttcacccagaggttggcttgggccgcgaagtacgtggtcgaaaaaagctttaaaccttctgttaaaatgcctggcagccaaatcagggttttcgttaaggtacttacgtcgttctttagacgttagatgtgcagctcgttccatagtcaatgaaggattgcaagccctaaagaaatcgggccatactgtgtctgccgcactcaacgttaagaaaaaagttggccatcgcgtgggaagcaggtgtccgagcaggtgaaagcgcgactggccggccgagacgatcaagaacgactacctatctataactactctgtgcgatgtggcggagcaaaaaccgctggtccctcagaaccgaaggttcctcggaccccggggtgaaaaccgcttatcggacagtctatcctaatcatagccatggggctctccagcatgagcgggtcgctgaacttgatgcagctgagcgcgaaccatgactgggctctagttgtgggaacgtggctttctcctcttgtgcaggaaaacttaatttccacctcgcttcgcttgatggaaataccgaagtatgctgcctacgttctcaccactttcagtggtactttgaatgtcattcctatgaggcgaattttaaatgaggggcatatggtttgtgctggccgtgaagggcgtctcatgaaatagttttcgaaggggtatctcgttaggtttccctaagacattaataaaataagcactgatccaacctcttgcaagtacagagcctcaatcttaaacaaaaagcggcacaaagactaaaaggcgcaatacacgtcaactcggggacctactggccacgaaaggattgctaatgcaagtgttgctaaagcgctgagaaattaacattattcctgttgtcctgttgctacccaattgcctaccgttattcgttttcaaaagtacaactattttcagcgtacttttgcgcggaggtaagattaaccgagagttccagggctcggcaacggtgtagtagtgcactgaaggaaaatgtcaggttatcaaaatcgatcagcagaagattagacagcggaggaccgcaaaaccgaccaagcaattgatgcagcttgctatacaaagcagctacgtcaaagtacacaacagttacagataaagcaaatcgaacagactatcaacactggcggatagctccaagaaagcacttcaaacgttgtagaaccttcaaaatttctcccatattctgtcagtgatcgccaggatataggaaaaattcggaaattcccgtattggtagaggtctgcgcatgaggcatgcgtgtgaagtgttgatacactatctcgatacactcgcttactcctagcaccacaggtcaactaaatgaagtttgacgacaaattaaatgatttctcagcgtatcaggctgttaagctttcttgtatgaaaaggtttcgatcggctcggggggggggggcatcgcgaaattttgtgtagagcacaatatttagtgtcgccccaaattagcagcgaggaagcgcagtgaacaaggtgctcagctagtaataatcactgcaactgggccaatggcggggcgtcaagtgaacctgcggtgccacgtcacactggatcgctcgattggctaatcagatgcctgctgtgagttgcatcggtcaggacagggtacgtgttctcgtaggtcttaatcgaatgcatttacgcgtcaatctactttgtttttccagcatttatgaacttgtactagatcacacaggtttcagcttcagcgtggcccgttatcagcgacacttcaagggacgaaaagggtacactgcctgccccccgcttccttcgcctcctttgctgttcattcctgaatctgcctagcctcgctcaagtcccaagcttccagtcctccccgctaacaaccacccaccatggccaagatcgctatcatctactactccacctacggccacatcgccaagctcgccgagtcggccaaggagggtgccgagtccgtggagggcgtgaccgccgagatctaccagatccaggagacgctgcccgaggaggtcctgaccaagatgcacgcgccgcccaagaaggaccaccccgtggccacgacggacgtgctcaaggaggcggacggcatcctcttcggcttcccgacgcgctttggctcgctgccggcgcaggtcaaggccttcttcgactcggccggtggcctgtgggctgccggtgctctggtcggcaagccggcaggtatcttcttcagcacgggcacccagggcggcggccaggagaccacggcgttcactgcgctgacgttcctggcgcaccagggcctcaccttcgtgccgctgggctaccgcgccccggagctcttcaacatggacgagatccacggcggatccccgtggggcgccggcactctggccaacggcgacggctctcgccagccgtcgaagctggagctgacggtggccacgacgcagggcaagtcgttcgccgaggtggccaagaagctggcagcttaagtgcgcatttgctcatgaatgagaccgtagtatttgttgtctcggctatactatattctaattcggatgggaatgaaagcctaactcattgccacctcaagccaacgtgtcatcccccgtctatttttcgcttgtgtgttgtgtaccttgccttgtccatgcaatggacggcctagtgtcggcgatggaggcggcggcactatcgtggcaggaccgtgtccgtcgagggctgacgagtgacgaagtgcgggctcgactgcacacctactcgacgctgtcggccaaatgcagcgagtccaaagagactcagaagcaggtggggcagctcttcggaggacctaggagcggaaccgtgtcacgctttgctgggtcctcgctgctgaacgttctgttcgacgacctgcgctccaccgatcggacgctgcgcattgcagcggctcgtgtgctttgcctcatggcgtacgagaacctgacgaaccagcagttgatcatacgcagtcaggccggaggagacgaagagatggtgggcgtcaccgttggctgggtgcacgccttcttcatcccgcagtcgctgcgagatcggtacgaggcgcaatgcgaagagcgcgggctgttcacgacccccaccggcttaaatgaattcgtctcgaacattatcaaggacaactatgcatcggcgtacactcgaatcggacgctactatgccggcggttgtcgcgaattcctgccgctttgctggtttcaagcgctggtgaacgattcatccgaagcaacggacatgctcgacgtccccgatccgaatgaaaacctcgtgggtttttacctcgtgcctagacaaatgcagttcccagagcaagacgactgcttccttcaggaaattctgtcttcaatccgaacagaagcagagcttgcacgtctccagcgagtgcacgccgctttccaacaagtcgcattccgagcgccaacgaaagaggcgagctccgctgcactaaagactgcactggaagggatactgaaacgcgcaacggcggcgatggatagcaaggaagaggctttcatgatgaaccagcaacactccaatcttttacgctggttggaggcatctcccgatcgcaatgtgacctggaatgagttgctggtttggtgctgcaccgatatgaattctgaagcgttgcttaaacgcttcggtgccgatgcatgcagaactattggtgatgtttttcaaaggttaatgcttgatagtggaagtttacaacgtcagaaggatcaagtcaagtcgtgtgtatgggaacctgctctggtcggcaccttgttgaatcacccagacctcccggaagagctcaaagcaaacatacaaagtttatcaggtacttacgctagccatcctgatcttcctcgtagaaattccccaacgaaaacgtcctctagcttggatgatgaagcgctgaatcgtccgtgggagtatttgatgcggctcgagctggcggagatccacccgattagttggagtgtgtttcttagcaagtggcgccaaagtgcagacgcgaaacccgaaggagacgtagtgcagatctaccaccaaaacgaaagaagacaccattctgtccatgaaggtgcacattcctccgtgctcgttgcccgcaagaacgccctcgtcacggcgtctcccaaccaccgcatatttcacagctttcgcgacttgaaccagctccgacagcaactgcctttaatcaccaatcgaccgagtgagatccgtgaagaaaccttcgagggcccatcgaccaccgatcggttgctcactgcgaggactcgcttaagcgaggcagaggagcgggaactggaggagaaccgcaaactatttcgtagattacaggagtcttcaacgaatctcgacgagcttacacgacaacaactggaggagaagcgggtagctcggggtaaggcccacgagagagctgcagagaaccgaaagaagagtgcacaactcgttgtccagcgtcaacaggagctggagcgcacgaaacgcgacagacaagtgaaagttcaagagcgcgctcgacgtcgagagcgtcggtggcagattttaagtgaagcgaggcaagagcgacaccaacgtgccaaatggtggaagcagaatcgtctcgaagctgaaatcgcacgacaagaagaattcatgcagcgactgcaggagcaacgcgcagctgaacggagactagaagagaaccaactcgcagcgattcagccgaaaccgcctccacaaactcctactcgtgaacgacagcagccctgtccaagaagacccttgtctgcccgagcggctaccgatccgcatattgttcgtgggcgagcgaacgtctatggatgcgccgccactaaagccttcacagcgcgaagacctcaaacggctcgaccagatttttactcggggaaccgcaatagctccagcccttctagacagcaatcagctagctttcgacgtcgaacccgtccagctaatgatgggggtagtggagctcaaaatgaagtcacgagcgcgtcgtctccagcagattcaagcggtaacgctcgtcaagcaggaagtgtaaatgcctgcgaaactctcgtaatgaccaacgcagcgcatgccgtagcgcaacaaatcgccattccgcctgtatcagctccagcttctgaagaagaagcggtggctccgggcgtgatcatggcgcagttcttggcgctggagaaggagcagaggttcaaactccgcgatcgctactgcatcaatcgcgtcagccacaagctcacatttgcggtgctgcagcaacttacccacgaagtgcggcaggacgcagcttggagagagttcctcagagctgcaggcggctccgtgggtatcaacagcaacaaacaacgaaacaaaagcaagcgagaagctaaggtcacgtatacagcgtttgctggtgtggcgaatcagctgggcatctccatgcctccgaagaggctccaagctgtggcacgcagtctagacccgtggaagactggcttcgtctcgtgggaatcgttctacacgtggtggagctcacaatgcagtcgataggtatcttcctaaatgaaagttcgcagttcgaagaactgtcgattgggaaggtttttggatgatatcgaacgacattcgcactacattcgtagcttcccctgccggcggatgacatcgaacgacattcatgctacacgggaccatcggcacatcatagatagataaaagatattgaagccgactagaacaaataataaaggtgcaattgtgtatattatagctatttctaagctgtgagattccgaacactgaagctcgacaagaatgcaatgattcctgttttacaacgactgggcttcgaccccaaccagtgagtttgcctaaagaaaagtagtcgaatttgggttcaacatcaaaatcctagttgcccaagtagatattactacagtttaccatagctagcgacacggcttgtcaaaaaatagttaatcaacttcgtcttcatacgaaagcatcatggccgcggtgtgatgatagtgcagcattcaccctgaaacaggtgcgctcacgctgggcgagaagaactacatgtgcgttcgcattcctgtcgaggggatccaacgaacgacagattcgccaaatgtcgacacaccagtgaaaggtgattttccgtagtgatgtgtgaagagcagggaatgaataattcaatttgtttgcacaacgtctgggcgtacgttgtactgtataaacttttgttgcatacaaaagcgacactgcgtgttgtgtgtatgccatatcgtgtcccgggtttggggcatttttcgcagagcagactactacttccgaattacttcgattttgcgttggccatgctaccgtaactcgagcatttaaactgtcaattcgaccttttcattctgtcatgggtcataacttttattataccctcctctttcagacacacgagaagatgacttcaccttgcgatcgattttcttctgtatggatagttaatcagagagattaactgaaaatcttgtgcaattttcgtggcatacattgttgacaggctggtattgtgtgaatccccacacgtattgaaatgcgtttaggtgtaccgtattagattgaacattccactgagacttcgccaaaaactacaattatttttaacgatatgtgatccaaaatgggaggtatatcttgagttttccgttcaacgattttgtatccaacgcaaactctatctagcagagagccaaagagctgcacctgatggtatgtcttctccggagaaaaggctagaagctacagtacctacagtaattagtctggcccagactaaatctgaatagcagatttttcatcgcccacaattattagtctggccccaacagtgacagactaattttgaattcagactatgtaattacgaatatctaaaaatatccgttttccagtaagaaaaaacatttttttgtgaaatggtatgtttatacgtattttcaaatattttttatagtttacctacatttatcgtggctttaaggagaaataaagactaaagcatcgcagatgctgctttgccatgttcactcaggtatctattatattttctagatatcaggttttgtgtgtgcgagatctggtaaattggcagctgtcaagtgctttttcaaaaagcattgccgtaaagtaggtagagattgactagaatcgtggtcaccacgacagactaattatgaacacttttagccagactaataatgaagacgtcaatttttgctcgacacgaattagtctgacccagactaattttgaagccagactaattttgagcccagactaattactgtaggcactgtatcgcctatcttcgccttaacttcggcccctgcacaacatcaaaactcggccgaagatagtggttacatttggcggctcgtgtacacttcgataaactatagttggatattcgtacccccagtaacttcgtcccgaagctgggattggctgaaaaagaaaataggaaacagcaaggaagaggaggcggctcacacagtggggacactcgcgggctcggtggtgttcgcagactcggtggcgcttgaggagatggtgggtggctttatagttggtgtgctcgtggactcgtggcgctcatgttcttgttggtgctcgcagactcgctggtggtgctcatatagctagtgatgcgttcggagctggagtttttgcggggctcgcggacgtggtggtgctcgtgccgttagtgacgctcttggactcggtggcgctcgcggacgttactcagtggtgctcgtggtgatctcaaagcccgctcgtggtgtacacagagctggaggggctcatgtagatggttgtgggtgtgatctcggtggtgctcgtggactcgttggtgctcgtggactctgtggtgctcgcgaactcgtcggtgctctcggactctcggagatcgaggtacactcggagctggtgggctcatgtagctggtggtggccgtgggctcggtcgtgctcgcggacttgttggtgctcacggggcgtgcgatgttcttagcttgtggtgctcgtggcctcagtggtgctcgcgaactcgtcggtgctctcggagctcgtgctgccctcccagctcatggcgcacttggagctcgtgctgccctcccagctcatggcgcacttggagctcgtactgctgggctgctgtcagacctggtggggcactccgagctcgtgctgctctcggaattagtctgtggtgctcgcggatgcagcgttgttttctgagctcgtggtgcactccgatctggcggtgctcatgtcgttgaagctggtggtgctctggtgcatcgaaggtggcatgacgtgtattcaagttacatatgcattgtgtaatcccaacttgaccaagaggcctccaactatctcactcatgctgctaagaaccggatacgcggtagtgagcgaaacgccgcccgctgctgatcagttagctcaccccaggctttgactgtaccggtaagttttccagagcgacggtgcttgcgctgtgttccttcttttgcatcagcagctttggtaaacccattgactaacactgtttcgcactgacttgccatgtttttcattgcagatacccattgaaccctgtccacctctcgcgataatgcaggaactggtgggatgctggctaagtcggcaacgattttaacagctcgaaggaaatccttctgcccgcgatttcctcgttcctttggaatagaacccaggccttctgtgtagaactggacgagaacatcggagagatgcctacccttcagcttcgtcaagttagtgggccacgccttaccaagctgaggggatcgcaacgagagcccgccagaaacttcagcatctggactaccttccgtcgcattggtggaggaagcgttgccttctggttgacgatcaagccgtcgaagcacaagatgtagcatgctactgtgctcctcattggaggtcaccagctgctggtgtcctatgagtagccgttccagcgtttcggcaaaggtatggaatccaacaaactgctctgcttgctcctggattgtaaggctgtctctaacatgttgtatcggaagtgaaaggaggtgacaaagcgtttgcgaatcttgcttccccagtcaagcggctcatcctgacattcaagctgcgagtgcagagtggaatgtacccgctccagttcttggtggacgatgtgttgtggtgcgacagcaagcgtgtcgcggtagtacatcagcagagtcgcggtaagacagtccgcgaaacctttcggtgcgatcttggagaagtgaagcaaccgtagtgcttgagcaaatgtactgacccttgtgaatgtctgatgtgattctttttcgaaacaggcaagcgtaggcgggtgaccagcctgctttgtgtccacccaccctccgagcacctttgcaacgttctggtcgctagccgtcgtcggcgatatgtattcgagtaagatagcaaatccatccatggaccagagcccccggtgggccaaatcagccaggttgacgctagcgttggagcttgcatgcgctgcgccacctcgacgcgctgagtgtgactgtaggctttgcgtcagctctcgctttgtgtcgtactgatacaccgattctaacactcgattaatgtatgcagccacacgctcgtctgttgtagcttcagtcacttgcgagaacacacgcggcgaggcattgtatgggtcagcaaccagctgagaagccaacgtgtgaaagggatcgatgctccagcaaatcggagagcaaaaaattgagatagtctattgctgctgcaccttgatgctattgaagcagcacacaggtcaattacttattacaatgctaaagccaaagtatatgcacgtaccgtgtcagatcaatgagaagaaaactaccatgccagtgcaagtccgtaaagtgtagcattcctacgtcggagctacgaccaactgcaagccactggttgttaagaagagtgcggtcgagtagcgccttcttatcatatttgagaaatagtatggttgatattgagcgaagatcatcaattgtcatgggtggagcttggttcttcagctttttgccttccgagatggcaagcatgagatattgcttttgcaaatggcgtcggcaacgccgataccactcggggtcactgcggaacaggtccgttcccgttttctcctccagttgcctcttgatagagctcagatagttcatcgatgtttgccagtggatgtcaggatcattgaacagaaaggtaaggagcttaccaagcatttccttagtcacctgtgctgccctcagcgtctccagtcaggttggtgtctacgtgttttttcaaggtgttgaatttcgcacgggctgaagaatcttgttttctagaagaaggccccaactcgctctccatcaagtccacgatggcttcgacatctgccccacgctccattgtcggcgtggtcagtttatcaaacgccctttcatatgttactagaatggtgctctaatgttgctcgaactttacacttatcttcggcgacgacgttaaccaaatacactactgtagcgcaaaaagaatgacgaccgtgtatgaaactggaaggaacctagttcaaattaatcgagctaggaatggctcatgtgtagctgctgtcgctcaggcattttatctacaaagacttaggttggtattattcttgctctgtgtgagactacattgcgaccagcagggatcccccgagctcatttactactggtggtgtattaatacaattaggcactacttgatcctgttcttgtcaaacaacttcgaagtacatcgttaccgatgttagtttagaacatcctaatgctacatgaatacggtacggccagcttaatacttgataaatggtaatgacatacttggacgaattgaagcagacacgggtttgttgttagatattcaggcgacccggacgaaatatgtgtgtgactgcgccatgttgtatcaaacagcgtttgaatgcttctaagttacgtcgtcgctgtacgccccggattcctgcgcgagaggaagcccgagcggacagtatcaaagcgaagggcaaatacccggtgtatcctgctcctacacgcgatcgagatctgctagacctcagttttgactcatcaaacttgaaacaaattgctggcttcatccgttttcccattgggcagttagcctggcagcgctaaatcttcaaatacacggatttttcttcttttgtctcctccggtaagtttccgagcaaaacacggaaaaagattctgcctaggcatcagcacacatttcagtggcaggaaggaaggaaggaacgtacgttgattagctagttgtcgatgatcattctgctagtacaaaagaactaaaattaaaactaaatccgtgaaatcttgatccgacgagcaggaggagcccgaagcgttgaagtaccaacttaactatactctgcgttgttcaatccatcggagtgacgatatatactgcagactggcaatgccttttgaaaagaagcgatcaaacttggtacacttggttgtacagtggtagattaggcagatgctgcggctgcgaagcaggcgcaggagatgcccgaatacatcgtttccctctacaagtatccgtgcaagctagtttcgaactgcgaaccccccccgggtccaccacccgggtccccaatattgaagttgaagtggccaaaagatcggctcggcccatttttggttagggacacatggctacaccgggggagttgtccgagttggagcgcggcgacggagcatgggagaatattcaggttgaacgcactgaagcatgtaccgagtgtgctagggagaaggacctgactgtgatacggtgtctaggaggtgttgcgctttggatttcggggtctgtggagagcgttcgcaggcgttgacactcgcgtcggggtaaatcggtatattgttgtgaattcggctgcatggttgagctggagctgatgtagttgctgtctattgccacaggatctagaaaaagccgtcgtagctcggagaaatgatgcagagcgccagcagcagcacttggaggccattgcgcagacgctgaacgctatcagcgagcaacttcgagcgtacgtgagaaacgatagttccattcaagctctaagactaacgagtagttggtgcgtattgctagtgaccgagacgaggaaacgaaccaacgacacgaagagcggttgcagcacgtggagtgccagcttcatgattttatcgcaaaagaccgccgctctgctgtggacgaaagtgctcttagcaaaatcagcataagcttaggcaaggtggagcgtcgtcttgatttactggaagacgaaatggggcacgtcgtgtcggccgtcgatcagaaggcagacgcagaagctgtgcaggcccaagggaagactttgcaagaagcgattcgccagcgagtaaggacttcagaatgtcgccatagatgtttgctcgttggttagatctgacggctatgcggtgtggtgaatagtgcaagaaggacgcatttgatcaagaagtcgctgcactacaagcggaattgaagcagcagcaacaggaactggggacgcagatatcaacgtccatcgcgaactttaaatctgctcaagagacgcttcttcgctcagagctcgagaactggtcactcaagacccacgagagcgtctgccacagcatgcagagcgcacttgaccaagaaactcagcagcaatcagacattctgaaaggcatcgatctccagataaagctttgctgcgacgctatcgaggcgcagcagaagcggatgggcgactttcaaggggaaatcaagacggaagttcgcgccacgatcgcggccgatcgagaggatatcgctcgacagtgcagcgaagctcatggacgaatcgactaccagtttcgaacccaggaggagtcactggagaggattcgaagcgagcagcacaagcttcgtgaagagatcgtggcaactggaagcaaacgatgcgaacaaacagcggccgatattactgctgctatcgaggaccttaaccgcagagtgctggatcgggagcaccaggagctggagaaaatgcacactcggctcacagaagagatgcagctctcaatcgccaatgcgttcaaggctttggaacctgccaaggacagagagcagcgtaaattgaggcagcaccagcacatcgtcgggcgcaaactggccgaactggatcaaatgatgcaactcatcgggcggcagctcattcaaaacacgtcccagctgcaagtggtgcgcaacgagcagctcgtgcacaatttcgagctggacctgcagaacgaggacgctggatatgacgacgatgatctcgtgcttctgtacgatagcgtcactgagaatgctgctcccccagaacttcctcagactccagtgtatcctagtacatcacagcagactgatcaagccaaagcagcaagtagccgtgagatgacaagagtagagcgtgaagatacctcagaattccggacacgccaatcccaacaccaagaacttcaggagcagctcgacaaaaagcttcgggactacagccaggtattaggctccagccaacgccaagcacaggaagatgaggacaaacctacgcagccaccaaaaaagtaagtccgttcattacattaggtaaaaaagacctcgacggcgaactcggttcgactctgtatcgatagtgcgtgaggtgggtggggcgtctcggcataactagtcgattcaactgaacgagccattcccgatgctgcttcggtcatccagcgaccccgcctcgagcgctccatttccattcggcagggagccgtttgatccaatggcaggcgtttccggcgtcgtcgacaccgtcatgacggctagtaagtcgaccgacggcggggtgatctccatacgaagcgatgcctcggcattctccagaatgccccacagatactcctgctcctgctcatacgtcatgccatcctcattgccagcgtccagtcgagacagcagctcctcgttcgacggttgcgcttggacacgcgggagacggagcgtcgccagttgagtggtgaactgctcgcccagcttctgctcgttcagaaggttctgagaagccgtcacgatctcgttcttgcgctgcacggcctgttccgcttccagcggctcggggacctcgctgatgtcgatgaaggcttgcgccgcgctctcaacaattccactcagacggtcgttctcgctcagcacgcccttgccggaccacatgccactggatcggccattgctgcccactccgcccatgccaagctcgctgtgcaggtccaagtgcttctccagctccaaaaagtgctgcaaggaagcatcgtccagaataccggggacctgcagcagtccgtctacatataagctcaaatatgtcagcagaagccacgataagcttgagaccgaaatcagtgtcactcaccgagatactcttgtaagctcgcctgacgtttaatcaaaaagttggggtcaaatctgagcacaacccaaagcaaatgtcagctcacccttggtccgcaaatacatcacccccatcaacacagcagcagtggcgtggagttctcagaacatttaacgcgttgggtagaaggacatcaggcagcagcataggggagggaacggagccgaagagaaagagggtgaaagagtccgctcggaaccgaacaaaagtccccggcgccggcctcaccgcctcggaactgcgacctcgtgcccccctccgtcgacgcttgtggcttgggtgtgttttcctcttgtcagataagatcaagtgatttttacagtcatgggccgccgcacacagcgcagcctcctctcttccttttcaacaccagagacctcgagccagcagcgtcgacgagcgggagaccggggagttcacacgacgcagcgaggcggtagtccagaagctccgtccagcaacctagcagtctcctcatccctctcttctctgccccgcgtgacgcgctgccgccttctcctcccaacagactcggaataacgagagccccctctcatcaccgaactccacgcacgcacgcacacacacacaactcctagacgacacgcaccggccgaaccactgcttctcgggcagcgacacctcgatgaggtccccgaagcgccgcacaaggcgcgagtgcagctggtcgaagtcgctgaagcgccgcgagatgcgccacaagccgccattgcacgagatctgcgcgccgccaggagctctgcattagcaccgtcacacgcctatagagacgaagagcaggtcacgcacctccacgatgaactccgtgtggtccccgaccgtgtcgtagcccgtgatcagcgcgctcacgttcagcatcgccatggtctccggactcttgcaatccgaatgaggttccagcagcgtaagtacgtgcgcacttagtgattaggcaacacggcagtaccgtatctgacgtgtttttgctcttgcctccaacttcaaagtgatccgatagattcccagacgacaagagcggcaaccaagccacaagcacagcagagacatcaaaaagatggcacatttcgggcgcggaggcagcgaccgcgtgacgctggcggtggacgtggacctgacgctgaccgacctgctccagtgcgcggcggcgtggcatgaggcggagcacggcgcgccggtgagaggccaagagcaagagcaaccagctcctgcgatctttcgtgctgtctggctaaaacgtcgcaccgttagcgggttataacgcggttattgctgcctctgctgctgtagatcaacgtggacgagattgcgtcggcgggctggacgagcgtctggggcggcggtgacgttgagagcaagacgcaccagttcttcgagtcgaagcagtccgaggagctcaaggcggtgcctggcgcctttgaggcgctcaagccgctgcgcaagcacttctcgctgctggccatcaccgaccgcccgcggttcgtggagaagcagactcgcgagtggctggactgccacttctcgggcgtgttcgacaagctcgtgttcgccgacgaggacagccccgagcacctcgtggcgcgcaagaaggagctctacgacgagttcaaggtgaaggtggcggtgggctctgacgccgccatgctggccgaggcagtgcaggacgttggacatgtcgtcgtcgtcggctccgtgccgtgggcgaaggaaggctctgaaacgcggagtggtgtcgtgcaggtggcggagtggaccgcagccccggaagtctttgagcaggtgatcaaggagctggagctgcagccgctggagaaggtgtttgctgggccgcgcctcgcgcgctacacagacgacctggtgacagtctcgacacggaaaccagcaggtaagagccgccagtgtcttgcgtcttctgtcggaagccatcgttctaacgctgtgtggccgcagtcttctacgctaacatcatcaactccaagttcacggtgcagaagcaggagaccgtccggctgcaggcgtccgaggcggccatcacgacggcggtgcaggcggccgagatcctgcgcatccagaacaacgccgtcaccaccaagatctcgacgcggtacgcgctgaaccgccccaaggaccgcggcggctaccgcgtgcccaagctggagctggtgcttcaacgcgtcgcgcgcaaagcctagcagaggtggatgaaggtctactgtatgtcagaagcagtggaggaagagtctgtaggcgccaacgcagcgcagtgcagagcagagcagatcagtgcagtggtgacgggaggaggaactccgaaagcaaacacacaaaacaggaatcagtgacgtctatgagtctctgctgcgggccactcactcacttgccgcgagcagctctagctctggcctccaagtactcccggcgctcctcgtcgcgcagctggcgacgctccgcctcgttcgtagtcacgatgtcgtctgtcgccgccaaaacacgattgttattgtttttgtttttcaagacccagttgtcaagtgaacagagccgaggaaagctagcgacgtacagaagcccgtcttgaccatgaagagctccatggccgcgcccgtgacgaagcagatgggcacaagcttcttgaggatcggcgtgagcgccaccgtcgcctgatgctgcggcgccattctccttgtgtgtgccacaggtctcagttgtgtatcactggtgtacggttgtaaaaccgtacaccagtgtagccatcttgcggcaaaggacactgtgcaccaccaacagcaacaaccgactgacgtggcaaatggcaacggcgccgttgagctgcgtgggcttccgctgtctggaccgggacgaatgctaccactacgatgagacgctgaagagcgcggccttcatgcacgacggagacagctgccacaacacgctggcggacgtgcagcaccgcttccggtaccacaacaaggacggcaagctgcagctgctaagcgccgacgaggtgcaggagctcatgaagtgcacgtacacgagcaagctcatcttccagaggacgcacctgctgcgcaactacgcgttctggggcttctcggactcggtgcaggacggcttcgaccagtttgcgccgctgggccacgacaccttcgaggtctcccacaaggtcgtgatcggccacgtctcgctgctggaccacgtcgaggagcagccgctgggactgttcgcactcgaaagcctcgcgcagtatgagtttttgggagagtacacgggcgtgatcaaggtgggcgtgagcgagatgaacgagttcgacccgtacggcatctcgtacccctccgtgtacgagggcggcgacctgtacgtgagcgcgagcgagtacggcaacgtcatccgctgcatcaaccacagcgccacgcccaacgcgcgcttcgtgccgatggtgcacaacggcatcctgcggattttctgcgttcgttttgttcggattgcttgcttgctgtggtccgtcttgcttacccactgacgccatgctttgacctgcagtttgtgatccaggacatcaagcagggcgagcagatcttcgttaactacgggccttcctactggaagtcgacgggtatcgagcccattgcgttccacgagccagaacaagttgttggtgtacagtagctttttattcccattacaaggagttaaatgtgagagaagagagaaaccggattgcaacgcaacgcgtacaagcccgccagtaacttgggagtgacgcatggtcgagcttactcctcgatctcgacgacggcctcaatctcgacggccacgttgagcggcagggcgttggtgcccacggccgagcgggcgtggatgcccttgtcgccgaagaccttgccgatcgtgtccgaggcgccgttgatcacggccggctgctgcgtgaagccgtccacgcagttgacgaagcccacgagcttgaccacgcgcttgatcttgtccaggtcgcccacctcgtgcttgagcgtggccatgaggctcagcgccacgtagtgcgcggcgtcgtagccctgctcgggcgtcaggtccttgccgatcttgcccaggatgagctcgccgcccgcgggctgcggcaggtggccggccaggtagatggtgttgcccgagcgcaccgacgtgcggtagttgcccttgggctcggccacggccggcagcgtgtagcccagctcctccagcttgcgctcgatgtggacgttgcgcgtggcggcggccagcgagcgcggcttcatggtgcggatgagggacagcatcgtggtggtctggggtgggagggggtggaagactggcgggcgacggggtcaaacgcggattgagctgctgcaaggcggaaggcggagaccagcttcaccctacactatgatcgccgacggggattggctacgcatccaagcatccaagccaggaggcgcatctaatcgactcaggtgtctgtatccatatcggtttacaaagggtttaaggtcactaatgatcctcgagtgtataacatgggtacaggatggtacaaggtaccagctgtagacgaaaatgaagccatgtgacagacgactgggatcttattccatccttcatgtcctggtcatagcattgttgacgctggtgctgctgcatcgacgcttgtagctcatgcagatgtgcgggaaaggggggctaggatcgtccttccttccaggtggacgcggagtattttggcgatgcagtctcgggatcaggaagctcggtgcaggtgcgtcggcgcctctactgaggaagaggcgaccgagccattcccacttttgcccaaaggggggagctgaggagggggtgagactatccgctcgccgaccatggtcgcggccccgcactcccctctccaacccccagcgcccgaactgctgcagctccaggcgccgtcgatcacgagccgagcgtcagcgcgtaggctgagcgcgtcggcagaggtcgtagccagcatcatgcagtcgctcaacatcaccgctgcgcaccggtcagccgcctaccagccaacgcgcgtcaagacgggctcgcaacccggtgttgtcaatcaatccaagccatcgcagcttacgcccgacgtccaaaaggatcccgtctgttcgctggacttgcagtctctcgccaaggagctgccggacaccgtcgatcacatgagagacaagcagccagcgtaagttgcttgcttttctttccttgaatcaatgtccgtcagctctctcaccatttccaatcttgcccaatgcccgctcgacgcagcatcagcatcgaagtcctcaagcccagcactctcacggggaatcatgactacgccgtggagatggcactgcttgccaaccaggtgcacacgggcttgcaagcccgagtagcccctgtccccatcgaggactgcacgggaggcgtctactacctacgaacgaagaatcgtcgcctgacggccgtgtttaagcctgcggacgaagaagcgtacgcccccaataaccccaagcaattccacaagccggagcagacttcgggtgtctcgggcatgcgccaggggatttctgcgggtgatgctgctgtgcgtgaagtggctgcgtacttgctcgaccaccagcgcttcgccaaggtgccaacgaccatgctggcttccgttttccacccagacttccactaccaagcttcggagagcccgcaccgcaagactggcgcgttgcaggcttacatccctcaccgtgacacggcagacgacgtcggcaccgccttgttcagtactgcggacgtccacgccatcgccatcctcgacattcgactcgccaaccaggaccgccacggaggcaacatcttggtggtggagcccgccacgacggtcattcaaactactggatcagtggtgatgaccaagtctcaagctggcaagaaggtgtctctcgttccgatcgaccacggggcctgcctcccacgcgtgtcggcgctctcggagaccagcttcatgtgggttctgtggccccaagccaagcagcccttctcctctgcggcgctgcaatacatcgctgcgttggacccgcaccgcgacctgcagctgctccaggataacttaccggtagagtatcaactggagcaggaggcagcgctaacgttgctcgtctgcacggcgctgctgaagttctgcgcgctcgagctcgacatgaccgcgtacgacattggaacgctcatgtgccgtcaaggaactgtcgcccagcaagagctgaacccgagcgtactggaactgctcgtgtctgcaactctgcgcgaccccgcagtgctcaagagtgaggcgttcctgaagctccaagagaagcagaagccgctgcaaaagtcggtgtcgagctcggataaagcgtggacaaactacgtcaccacgttcatgtcgaccttccgccgggagctaacggcgcggctcgccaccaaatagatgatagtaacacactctacccactgctgtttacggaggcagtggagtagatgttctccaattgagcagctattcgagtttgcatgtcttgaagtagttcttgcagccaacgcgtcatcggaacatccgcttgaggactcgcgttgtcatcagcctgcgcgaacacgctcgtaaatagaggcagtacttcgctttcgatcacgcgtttgatgctatcctgctgtggattggatctgcacatgacagacgccaattccgcggggtctttgtctgtaggacttgtcttctcgattgacgaggtgctgctgtttctggtcaattgagccccgttcgtgttcaattgcacgttcaccgtgggcgccactacgcacaaccgcagagaagactcgacaagacgctccatcgctctcgcgtgtgactgcttctgcctctgcagcaacgacacttgctctgcgagaaccgactccacttcggtcacacgcgtctgcagtgctaaattgtcttgttctgccgtcttgagagcctcagatagacgactcagctcctctgcttcttgcttgggtaattcagcgtggtcggcttgagcgagttgttccgtttgctgctgttgcgcgagggttttagcggccaagtcgctgttctcctttatcaacgtctcgatctgcgtttcgtaggcttcaatttgcttcatcagcgtagccttcttcactttatcagcgtggagctccgacaccctggcgtgcaatctgtctacatccgcaactttttgagccattcgcaccttcagagcgtgcaccagcgtctcgtgcttttgcgcctgcgctagagtttcatctctatgttgctgcccgagtatctccatcgccttctccttggacttaatgtcggccagaagcctttgactcacttgatcgaagagcttgcactccttctggtgggccgactgctgttcctgcagagactttcgtgatgtctccagagcttgctccagctccaaaatccgtcgcgcgtgctcggagctgtcgtcaagccacgatcgggtctcacgttctcgctcttccttcaccagccccactgccgcctgggcttcttcgaggtctttcgagaccctgatcagttcctgctcgcgctcagtgagctgctgggttagaagttgaatctctgcctttaaggctgcgatctcgcgtagttgatcggctttaatcacttcatcggcgctatgctgaagcgtgcattgaatcgccttatccacaggcaatccatctcccccgctttcaggttgcaacaacttcacctgcttgtccagcttagtacacacctcctcaatcagaacacattgctccgatttttccgtcagttgatcgcgaagttgcgagatctcagcgagatgcgagatgcgttcttcccactgtcggccctgcacggcttcaatcttgataatgtgcttctgcagctctgaagcagaagcttgggcttgcgcgctctcgtgatgagctttcactgctttcgctcgggcgatcacacacttggtacaggccggactcggtgcagttgggacttttgacgacgttgaggacgccgacgcagcgcggaattgcccaccggcgaccaccttgctttggcctcgcatcctgtttcgtagtatgagaactcaatcgagtgttgcaggtgaacacaccaatacgtatacgtacttttccaccaacttcgttcggagcaaatcgttctcgtcgcgcagttgctgcacttcgtctgtagaatcgtaactcggatcctctcgctcgtttagatgtccctggtgtttagaagaatgagtatatcctcctgtatgactcgttgttgaagtgaagacttgcaccaccattctatccgagacccctctcgacggcgcatgcgtcgaagatggtcttcttgcttgatttccgtacgcaactgtgacttcagtgttagttgctgggcgtcttgaagcggttgttgcgccagcactttttggtagaatccccagcgctcggcgtcccccagttgcgacagacgaagacggtcgagttactggcacttcagctttcaagacaacgccaacttctggtggtctcccgttgagcgacggaagagcagaacgctgctccatgactgcactctgacgacaatttagtgctcaacgtgaacaagagaggtatgtttttcattccgcttcaacaccttgttatttttactcactggcagcgctacaaatgagtcatttgaaatgactaaaacaaattcctgtttagcgagttaatcatttccaagctgaggtacttttccaggatgatgtgctccgcggggtttccctcaatactggcgaaaacttggctggaggtgatggtggatcactcttgctactgcccatcgatgtctgaagtgccggtgtttgcagtcgcttcagtagcgcctcattggcctggtagagcttcttgcagaccgcatccttttgctggagctggtcgtgtagcgtttccaagccatttgtgagctctaccgactgcgcctccagcacaccgcattggcgtttaaaggacaagtagagctgcgttgattccgtgatcttggcgaccaggatgcgctgctcctcggcgagctcgtcgaactcggcaaccatcacgtcaacatactgcgccaactccttggataggtgcttctttagctcaaacaagtgagacgcggctgagttgtcttccgggtttaacgctcgattctcgacgctcgagtcggagagattgttatcaaacgtcaagaacgcagtcgcttcggcgagaagcacgttcttgcactggatcatgcgcgaccgcttcgcttcgagctctcgagcatgctggttaaccgccctcatcctcagctgctctaacttgagctcgcactcttccgcgtggtccatctccaattgacgcagcttggtcgtcatctcctgatcaagcgtttgttgcagaacctggagctcttggcggcattcaagctcaaagtcctgacgatgtgcttctaatgcttcgattcggtgtcgttctgctgcatctttcagtgcttggaggcattcttgatgagagacttgcatactgtcgtgtaactccatgatcgccacgcggttcttcttctctaaatcgcgctgcatttgttgctgctgctcactgtgtgatctcgtgagcattttcttcaactcttccgtctccttttcaagtgacaacgaagcttcggtcttaatgtcattgactttttcttcgtgctccatctccagtcgcttgcggagttgttgcagctgcgcttgggcaccaaatgcgagcgccttcttcaacttctgcaactcttcttcttctctctcggagtgcgacgactgaatctctcgtttaagctccgcagtccgctcttcctgcgcctttaataccgacgcgacggctgcttctctgtgatcaaacagttcctgttccagtttttgccgctgctcaacctcccaactcgcgagagcctcacgagagtcgttttgcatctgcttcaacctcaaactgagttcttcttgcaattgtctctcaaactcacgcttcccacgctctgtttcgcttgtcagctgcagctccagttgcgagagactctcctccatagcagcgttatgactgctctgcaactcttgcaatacccggttccggtcttcaagtagcgtaactcgggtctttttcactgccgcggcttgctcgaactcgtactcttccatcttcgcgcgcacaagcgccttggtttcgccctcgtatctctcacgcaacgtcatgagcgtcatgtgcttcttcgagtcgtatttgcgctgcaactccttgagatacgtggcttgcatttgccggtggtgcagctcgatcttggtcgtgctggattcgatgtcgcgttggcatttagcggcgaaactcttcactgccgcagctttctgagccagcaaagcctcctcgtcttcaatagccaaacgaggcataacaccaacttttggtgaagaactagtgctaaccatggaatctgatagtaccgactcggaatggcgagaagagaaggaagatgattttcccccagttcgctcttttgtgctactggctgaagatacacgagatgcatctgatggcaacacataacccgttagtataaactcggagttccatggctttaagtaggataaatgttttgttaccgcaagacttgacgcgctgcaatagctgatcgcatttcaataaagtcgttgccacttggtcggcaacggcgcccgcctcctgttgcgccttggacaactttgagaaaatgggtgatgacgcatcaactgcgttggaagatacggacgacgttgaagacactgcgagttgctcttgctccttctccttgttgccaatgcgcctccttcgccctcggaacacgctcagccgcgtctcaatggctgcgagctcgcgctccacgtctcgacaggcttccgttgccacagcggttttagctgagactgagcgttgttgccgttctccgtttgaactctcatcggatagagacgaaatggacagagccttcgactgccgacggacatgctgttgcgagctcttggcaaaggaatcggaaggagaagggagggagggcgacggcaactgtaactcgtcctcaagggcgaggaaactggagctcgagtctgcggccgtgaccgacatctttctctaaacgatcgtcttctctaaccaacgtgctcaaacacataacggcctacttctcatgaagagtcgccgctggcgcgactcgacaacatgttgccaatctgcgccgcagcgataatgctagcatgaataagttgtctttgcacgcatcatacgtatccctcgcagcaaggttgattgcctcccctccaacgagtcgagtcgagtttgttgccacgtttgacttgacctccgtagttgaagttgtgttgttttgctaagcagcacgtcgggtcggtctggtggcccgaacgtgcgatcgttttacgtccatacaaacttcaagtgtaatctctcgccgcctcttcaggcgcgaagatcgggcggccatttcggcttttgctcttgcatttgcatgggccttcgcagcaccaaagctccagccgccaccacccgcagtgttaacaccatagagagcgccagtcatccggttagcaccatgtcgaaagagacggagcgcaccatgcagtaccaggacgagttgccgtcgctgccgctgcccccgctcgagcagacgctggagcagtacgtgcagagctgcgaggcgctgctggagcccagcgagttggagcacaccaaggccgtgtgccacgacttcctgcacggcgtgggcccgcagctgcaggccattctgcaagagcgcgccgacacggagcgcaactggatcgaggagtggtgggagacttttgcctacttgcagcctcgctatccgtcggccatcaacatcaactggtacggcgtgttgcccggcaactgggggccccgggacatgagtcagtgtgaagctgcctctatcttcacccatgccatcctcaagttccgcaagaacctgctcgagtacgtaaacactattttttaagtggtgttaaccgcgcggcggttagatgaaatgttggaaaagtatctaaccatggggtttgtgttgtgttttgtttagagagaagtacccgccggagaagatgatgggtcgtccgctgtgcatgcacacgtactcgcgcatgttcaacacgtgcgtcatcccgggcgaagagtgcgacgagatggtgtcgtatccgcacgacgccaagcacattctcgtgctgcgcaacaactgcatgtgggcggtgcaagtgttcgacgacaagggagaagaaatccctctcgccgacattctgaggtaaagtgttgcatcgcaacacccattcacctaaatcggcaacagaaaaaatctctaaccatattttttttacgtgttgcaggcaattcgagttggtgcgcgaagaagccaccggtctcttcgacctggagcgttaccccccagtcagcgtcctcacctcggagaaccgcacgaattgggccaaggtaatgaatgcaacaattgaaaatactcacaaaaccacgaaaacatactcactctttaccttttttcctgctacgtaggctcgggaccacattatgtctctggacgacatcaacaagcagtcgttcgacctgatcgagcgcgctctgttctgcgtggcgctggacgagagctcggcctccacctacgacgaaatcgctcgcaactgcctgctcggagacggccgcaaccgctggtacgacaagccgttcacgctcatcatccacgagaacgcgcgtggcggcctgaacggccagcacgcgtgggcggacgcgctcgttgtcgtccgcctcttcgactactgcatcaagtacgtaaacgagaacttcaaggccaagttcgccaaccgcgcggacctcaagccgacgctcaacatcaagcctaagcgactggactgggtgctggacaacgccgcgtacacggccatcgagtgcgccagcgcggcggtgggcaagctcatccacaacagcgacatcgccacgatgcagttcaaccactacggcacggccttcctcaagcgctacaagctcacgcccgacttcttcatgcagatggccatccagctggcgcactacaagatgcacaagaaggtgcccgcggtctacgagacggcgcacacgaggatgttctaccacggccgcaccgagaccatccggtcgctgtcgaaggagtcgctcgcgttcgtcaagacgatggagtcgagcgcctcggacggagccaagtgggacgcgctgcgcaccgccatcgacgcccacaaggagacgctcaagaagtgtctgacgggcgacggcatcgaccgccacctcatggggctccagatcgtctcggagatgtcgggcatcacgcccaagccgtcgctcttcacggaccgcgcgtttgaagtgagcaagaagtacctcatctccacgagcaacatcagcggcgggccgggcgccagccccatctggggcggcttctcggccatgtacaacgagggctacggcgtgtgctacgcgctgcagccggaccgcatcaacgtaagcatcacgtgctaccacgtgtgccccgagacgagcgctaccacgttcaagcgctacctggagacagcgctgctggagatggtggacctctgcctcacgcgcaacgtcatctacgtgagctcgtccaagatctaagtacctacgtcgcgcagtcagacatgccaggccagtcctaagcaagaggacgctacttatagtgtagtgtcccccaagtgaacccattccgtaattctatcaatatgattggctcatgcacttgatgctgattggctgatttacgttgaagatcttgaagcgccgcgaaaggtcgcgatctttgttgacaagcatcggatggcggccatcgctacggcggacttacggtctcacttccagatttctctcctgccctcggatctctctctctctacctctctcggctcgagatggtgttcgcccgcctgctgccggcggtggtgtgcggcctggggctggccggatgcacggcccaggcggccttctacgcgtgccccgagggctgcgcagccatgctgctgccccgagacatggagatgatcgacgactgcctgtgcgacgacggcgtggacacgaccgaggaggaggcggcggcggacgccctggacagcgacgagcccttcgcttgccgaggccgctacaagcccaagcgcggtgggggtgcagcacagtccgtcgcggactgcgactgcttccacccatacgagaaagacccggccacgcaagagtgcgtgctcacgagctgcccccgcgcgggcaactatgagcccaagtctggagtcgttgaggtggactcgctcgctgattgcacgtgtacgccgccctacgtgaaggtggaggcgtcgggcgagtgcgtggcgggtgacgctgtggccaacagggccaatattcgaggccagtacgtgtgtccgccgaactcgacgccgacaccgggggttgtcgctgagtctttcgacgactgccactgcacctggggctttgtgcgcaacagcttcgacgagtgcgagcgtgaacgcgcggcgtacgtgtgtcccgtcaactccgtcaagagcccggatctcttgatccatgaacgcccgcgcggcttcttcgactgcgtgtgtctttcggatggcaactataaacgcgatgaggaggcccacgcttgctggcccgtgacgcagatcaagcagcgcaaacccaagcgaaggtcgagtaatcgtggcgctgtggaggcggaagacgagtaccgagagtacgatgtcgtcaactttgacacggaaacgttcgagtgtcctcccttctcccgcgcggtggccaccgtgccgcactcggtagagcagtgccagtgtcttcctggctacgcatggaagctgcccgagatgatctgcgtgcgcgcctcggcgtacaagtgcccagaacatgcctacaaacggacacagaccaagggaaccgaggtggaggcaagctttgcagactgcgcctgcgcgcgtggatacttcctcgatgctgtctctcagcggtgtgttccctggatgctggccaactcgaacacgtgccctcctttcgctgtgctcacgcagtggcctctgcagagcagcgcgaactgcaagtgcatctacggactcaacgagacctacgaagaagaggacgaagcacggcgaaaggctgaagctcaggaaattgccaatggtggcacagtgaaggacacgccgcccatgcgccgccgcaagaagaaagagtgcaacacgaggccagccgatagcacgagtgcagacttctcgcagtgcccccacgactccatcgccacgacttggcctattgtaacaccgggtgactgcgcgtgcctcgaaggttttgagatgactccgttgagtgaacaggaggtcgcccgtggcgttggagatggattccactgcgtggcctcaaccgagaaggctgtgctcgcggatgaggcggccgcagcgtgccacgcgcccggagttatccacccgctgagcggtgagtgtcgtcttccagttgaggagattcctgccaagaaaacctctggcaagaagaagactgcaacggagacgaagcctgaaggcattctcttcaagggcattgagtacgactacgagctcgtggacgacacgatcatgataattcagggcgacatcgctatcggtgaacgcctcgtttgggaggacaaagaccctaatgacgaggacgacagcacgactcgaatcgagcacgtcctgcacggatactacaacgaagggcgggaccatcggtggccacgcgacgaattgtgcttccaagtggacaagagcgcgcgtccgttcctgcgtacgctgctgtctgcaaccgagcacatcaaccacgccacgggcttcaagttccgccgctgcgctggcgacaactgccgcacggacatgggctgcagaagccacgattttgtcgtcatacaaggcgtcgacgcgtcctgctactcgttcgtaggtcgcatcggcggaccgcagcgacttggcgtctccgcagactgcggacttggcaacgtcgttcacgtgctgctgcatgccgtcggactgcgccacgctgtggaccgaccagaccgtgacgagcacgtccgcatcgcgtgggagtgcgtgcccgaatccaagcgaagctacttcgtagtggaagacatgggcttgacttcgacccccgcgagagcagccgaccgtgtcctcgacccgcctccgtacgacctcttcagcatcatgcaccacccggtcgacgccttcgtgcactcggcgcctgacgacgacaagccgcagtggtgtccgagtatcattccgttgatctcagacgatgacaagcggcttgcagtgatgaaggacatgggccaacgcgagcggatgaccaccagcgacgtgaaatcggtctgggcgttgtatccgggcctgaagaagaagcaccacgaccgccagaagtccggcgagagtggagaagctgaagttgaagagctgcatgacagctacgtgcacacgggcgacgacacggtagaaaccgcgtcggtcggcgggagcggcagccaccgcggcttcgggcagcgcctggtgagcttcttgggagctgtcgtgacgctggtcggcttcggcgcattgcttgccttcatcaccacggagctcaagcggcgcgcgctgctgagctccgactcggactacttctacgaggcaccgctcatcgacagcaagaacgacatttgagtcgacatggcgtcgagttggccatttccctgaatgtatcgaatccatagtgcacatacccacccacccacccacatgaacaaacgtacactgcatgtagtccattattgaacgacaggttgaaagaagcttttgaaccaccatatccattgcgttctgcgtcgctgctcaccatcttcactctaaagggacggcttgagcggccgcagtctgcctcaaccagttcgaccagcaccctacttacttgtcctcggcctccttctcctccgcagcgtcatccgccttggcctcgtcggcctcctcagtctgctccggctcctccaccttgggctccggcagcttgccgtctcctcctgctaaaatgtccgcgagccgcgcgttcacgtacacgtcgcccttgtccgccaggtatctggccagcgggatctgccaccacaagcaacaacaacaaatcaattagagccacatctaaccaatctaatgccgactggcggcgtgggcccacgtacgtgctccttgaggatgcctccctgctggtcctgcagcagctcgatgatgaggtgcgagttgatctgcatctcgttggccgcctgcttggcgatggccacggcctcgtcccacttgccctgcttcttggcgttgagcacgcggaacgtgtacatcttgtaggacgtgggcacgcgcttgtgccccatgaggcgcacgatctcgtccacggtctcctggtcctcctgggccgcgtagtgctcggccaggcgcacgaagctctggttcttgacgtagtggcgcacgttctcggcctggcgcaggaactcgagtgccgtgtcggccgcgttctgcttgatgcaggccgacaggaagctgccggccgcgaacgtggacgggtaggccatcttggcgtcgcacagcagcagcgtcttgtgcacctgctgcagctcgtccgcgcccttcatctcgcgcacgatgtggtcgatcttgaggggcgtgaagtacagcggcgccgtggggatggacagccgcgcgccgatggcggtcagcgccttggtgatgtccgccacgctgccctcgaccttggggtactcccagttgccgctgaaggcgcgcacagcctgcgcgcggccggccgtcgaggcgctcgcgcgcagcaccaacttgcgcgcagccagcatcctgtcctgtcctagggtcctagatagatcggtcggtcggctcgagtcgagtcgctccttcgggcgcactcagtcaacgatatgctcggccgggccaagcgtgtggccattagctccgcgtaccgacacggaactgaatagtaccggtactgtttcatatacagaggtaatgctcttgtacggggttttgggtctcttgtacagaggtccgtagcaccggtttcagaccggtaagctcatttggcgttctgctggctgtggctgtcgcttgtctattggcagggggtcaagaagctcacgacaagaagagcaagtaaggcgaacgatggcgggcggcatgcaggcgttccgcacggtgatgtcgatcggccggcgccagggcgcgcggcagctggcggcgcgtccgttctcggccgcggccgtgcagacgcgctcggcggaggagtggatggagaacatccgcctctcggccaagaaggacgtgctgatcaagcgcaccaagttggcgtcgttcctcaagaccgtgaccacgagcgagcagctggaggcgtccaaggagatcatgaagatctacgagcagaagcgcgtggacccggacgccaacgccgccggcctcttcgtcaagaaggcgctggagctcaacgcgcccgacgtggcgtttgacgtgctggaggccaactaccgcatcggcctcttcctggagccggccacgctcaacaagctgctgtccaagttcctcaaggacggcgagttcgacaaggtcttcacgctgcacgagatcggccacagcaagtacaacgtcaagagcacggagcgcacctacgacatcctcatccgggcggccatcgagcaggccgactacgagaaggctgtggccttcctcaagacggctgcgtaagtgctactcactggttgctattttgtcctagttaggtgtattcgatgctgactgtgtgtattgtcgttctggtggtgctatcctgttcttctttctgcctacagtgaggctcagaagctgcagcgcgtgacgtgcaacaacctgctgttcaagctcaaggacaacgagatgcaggacaaggtgcgtgtttgttcatgtttttttcttgtggtatgggctgttatttactgacgtgttgtggttaacgtgggcagatcgaggaggtggcggcgctcatgaagacggcgggcgtagagcccaacgagacgaccaagaagatcctgcagtagatgaatgggtctgctgtttccttctagccgagtgcataagcctttgcacatatagcgacaacgcacaaagaaataaaaagcaaaacactgatgtccacagacgccgtgcctggctagaagcacccgcgctgttacgtcaaacctgcaccagtgctggtcgaaatcgccagcggaggtgttagacgcgcgcagggtctaaccatcgcgtttctcgtgcatcgagcagcctgcaacggcgaatttgatgcaactttactgtcaaatcaaacgcgatgaagtcgcctttcaagctgaaggacagggaaagctgagctgctgttctaccggtaataacaatctaccacacgggctttattaacgcgttggcttctacaacgcacgatggcgttctaccagtgctgctctacttggtctggttcttgacgccgaggatacgggcgcggatctcgtcctggtcgccgaggtagaaggcgctgagcggcgcgatggcgtccttgtgcgcgatgggcttgaggttctcgtccaggtggtagacgagcggggcgcccgtggggatgttgagaccggtgatctcgtcctccgagatgttgtccaggtgcttgacgagcgcgcgcagcgagttgccgtgggcggcgatcaccacgttcttgccggacttgatggtgggcacgatggtgctctcccactcgggcagcacgcgcgcggccgtgagctcgagcgactcggccagcggcagcagctccttggggacgtcctggtacttgacgtcgttgcccgggtagtactcgctcgaggtgtcaaggtccgggggcgggatgttgtagctgcggcgccactcgagcaccttctcggcaccgtgcttctccacggtggcctgcttgtccaggcccgtgagcgcgccgtagtggcgctcgttgaggcgccaggtcttgtgcacggggatccacatctggtcgctctgctccagcacgtgccacagcgtgcggatggcgcgcttgaggtacgacgtgtaggccacgtcgaaggtgtagccctcctgcttgagtagctggccggcggcggccgcctccttgttgcccttctccgagagctgcacgtcgtaccagcccgtgaagaggttcttcttgttccactcgctctcgccgtggcggatgagcacgagcgtgtgcgtgtgcttcatggccttctgctgctggtgcagcatgcccagcgagcggttggccacgcgcgaggacatggcgagggagcggcggagggcgaggaccatcgtctggaacgtgcgactaggacttgaggggagcggcgcagattcgtttctgcttgggggcgagtcgacggatcgggatcgccggatgtgtagccgcttttctgtgtggccacgagttggccaatacaggggcgagggccaaccccttggcttgctcatgaaaagatggtgagctccacgccctgcacagtggagtctacgtgtacccccgtgcgttgcactacagcaccttcatcgcagtggaaatcaaaagtgaatgcattcaattcgttcgcgcaccgtctcggaacggcaagacgctacgactcccgagacgacggccggctttatagcatgcgagtgacgcagcagcgcacaggatcgcaagagtgcaggaaccacgaggtgcagtcacacgcctacttgcgttcccggcgcagcacgatacggaagctgctgactgacctagatatcctcctgcgacttccgcacaatacgacggcagtgcttcttgaagccatccttgtcgtttctccactccacctaaacgttcgtcatcaaaattcaagccaccgagtcagcccctaaaactacatgcgccgcttcttgcaagagatatcagcgcgccgtactgcagcatcgatattggcgggcgagtcgtcgttcgggtccgagagcatggagatgaccgacactaagatggactcaacgcccaggatcgggcgccaccgctcgtccgccgtctcctgctggttcagctggtcctctccaggcgggtgcaggatcgagatgcacaccactccgttcgggtacactgcaatggcaacaacatcatcaacccaccattagcaccccctcctcctaaactctacagcaacatctaaagctgaggcttgacgcaccgttggggtgccacatctccgacttgaacgtcatcttgggcggcatgttggggaagtcggacgggaactcgagcaccgccttgaagaagccgccctcgtacagcgtgtcgggcgggcccaccagcaggatctcccagttgaagatgttctcgtcgtcgcccaggccgaccgacacgccctcaggcgggttgcggctcatttctaggcgcccgaaagatccacacacgtgtccaccagttagcaagagattgcacagtctccagaccgcagattcgagcgggaagagcgcctatcaggggcttcagacacaggggggcaccgtcacgcacctagaaactgcctccgcagaagctccttcgcgtagtccgtcgcgcccgccatgcttctcgcccgatccgatactttttcagttgtgatcgcgtggctcaaccgcccgtacttcgagtggtgcacatcaccaagaggcgattggctaaaactgaagctatatattgattggtcgatttaaacatataggttcgaccaatgaaattgatgatagaaaccgttacagttggtaaactacaactctagctaggcttagcgtcgttctgtacatggacactttggctgcgctggggggaaccagagagtgtccttcatcgtcctttctcgatgcggatctccgacagcgagctgatggtgctggtctgcacgaacgttgaggtcgcaggcgcaatgatcgggcccttggtggcctgctcgcgctcgaagcgcgacgcgccgttgaagacgtagacgccgaagatcacgagcaccatgcccaaccaattgagcggcgtcacgtcctcgccgtagcgatagatggacagcacgatgatcagcgcgcgcttcacgcagttggccacgctgtgtgttaccggcgacaccagactcatgagcatgtacgcgagcgcgctctggatgtagaagcacatgccgtccagcacgagcagcacgaagacgaacgtcgctgagcggtccgtcttgttcgcctcgagcaccgggtcaggcggagtcgccatccagttgtagaagatgaacatgagctgcatggccacggcgataatgctagtgtacagctgcaattgcgaggtccttcaaaggcagcaagttgaagtgaacacgctcgttagcacgtacacctcaaccaatgcatagggccgttggttagtgatacgtacgagtacgagcgattgagcagtcgcttcgtcagcacattctgaatgcaatcgacgcagttggacatgagcgcggcgatgaacccgatgacgtggaacgagctgtccgagaggctgcagcagataagtcccgtcacgataggcaccagcgagaagttcactctccagcccgtgcgctgaccgagtaggaaataggtcagcacgaccgtgaagaatggcgcagacgacttgatcgtttctgaagagaagcgatggatagatagatacgtcaggaacacaatccacaacgtcacaacatgctcttccgtgcagcagagcacgccctgatacaacgcagaacaatgcaacgtgccaacgtacgcgtgaaggagacggcgatgtacttgagcgccgtgagtcccagcagcaccgtgaggattcgcacgcccgcgagcagcaccatgtccttgagcccgtcgtccagcaccttgcgcaggccgcgcttgcacaccgtccagcccaccaggtagagctcggagcccaggccgcccacgaccgacataccgagctgcgcgagcgacagcaggttcgagtccacgcgcagcttggccaccacgtagcggttggtccagagcgtcaccaggctgataacgtaccaggctgccgcagcgagcagcacaacacaacccaactcagttcagcattgcaacacagacacagcagcagcagtagatggagcacgcaccggcgatgcaggcggcgactttgccctcggtgctgcgcagcgagaacgcggccttcttgtcgtggaactcgcccatcgctgccgccgggtcggggaccagatgcaaagtgttccggcggcccacgacgtggctgctgaactctggcgatgatccgattggtcaattggaaagccttttatcaaccaatccacgtcgaccgtttcgtcactgacccaaaatagcggacatggctacctttagcttcaagctgatccggcgagctcattgctgtgtcaagcaagcggggaccgaccagaagcggcaaagcacccatcgcgttggctaaagctaagctctgacgaattcgccgggtctgctcgcgccatgggggcgaagagctccaagccgccgccgcgtaggatcgaaccggaggtcacagccgttgaggttttccaggacaccacgccccaggccccgcgagaacccagcagcaatcataagcggcagaagggagtcgctccagcgcagggcggtacggcacatgtcgtgcggtcgattttgcaggaaccgccgcctcaaaccactactgcatcggagactccgagcaaaccgcccgacactcagacaggcagtgacgacagccacaatgcgaaggacggaaagctcaagaagaagcggcgacgcagtaaaaaggagaaaaacaagttaccaccaccgaaactcgtgcgggcgcaaacgcagctcaacgagctcaagaatgttaagccgctgctgcagcagagcccccaagccaggcagcaacacttcgagcagattaaagatgcgtacgcgttggacgaggaggcgaagaaagcgccaccaccggatactcgctctcgatttttcaactttgaaagctggaggaagacgccgcaaacaccctcaggaaagggtgacgtgccgtcaccggaatcatcacctcccccacttgtacgctcccaggtaaggcccatcctgcatcgaaactacatttctattgatgtttataatctcacaaatggtttgatatgttatctccagcagtcggcggcagggccgttcttcgcgactagtgatcgaagttcccgtggcacggaggagatgtcaaacggctcgaacgacgacctggaagacagtcggagtcttgcattagacgacgtcgagtcgttttcaggggctgcagtaaccagatcatcccaaatcacaatcgcgacgtccgcattcttggcgcctacgaaccaagtggaccacgtccaacccgatatccaaacaaccccagtaatccgcgtcagaactagcgacagacgaactcctgaacggtccaagcgatcggtgcagtcccagcggtcggatctccgcctcgacgacgtggacgaggacctcatggaacatatcctaactgatgatattagtagttaataaccgataagttgccaagtatctttttagtttcgtggcaaaagtggtcaagtttccaactaacaaaaatgcaacaccagcccaaattaaggttattttgggttttcagtattcgaactaagtacgaaatggtgatcctgtatcattcacgtaaaagggggagaacgcgaggaagctcgagtcgaggcgggacgcgatggcgcagtggagacgcttcgccttcttcgacaaggaggtgctgaaagatgccaatgggccgtggatgaaggtgcgtgtctgctctacctgctgcacaaatttcgtcctacaacgccctctctaacgtctcgaaatccctctctcaatctcgccactctctttagggcgtggacatcaccagcatgagcgccaaccgcggcctcatctgcgtgggagacgccgacggcttcgtacacttggccaaccgctcgctggaggcgcgcaagttccaggcccacgagctgttcgtgtcgcacgtcgtcatggtgcgtgcgtccgagaattaattaggttgtgaaggcggaatcaagttctaactctcctcgtggttgtcgctcaatagatgaagcgcagcaacgtgctggtcaccattggcgacggcattgacccgcgcgacgaggagctgcgcgaacagtccaaagccatcgcagaagcaggaagaggaccgaatgccgaggaggtgcgtggaatactttttattcatttattgtagattattgcgtatagatattgatatgttttgttgttgctgctgcagatgtacacgtccaagccgacgggcaagagcacggcggtggtgcgcttctggcgcacggaccagcaggacagagagggcaagcccaagctgctgcagcagatccctgttttcgccaagaaatacccggaagaggcggtgacggcgttcgcagtgaacgacgacttgagccagttcgcggtgggactgaagaacggcgcagtgatcctgttcaagagcgacttgaagcgccgtgcagaccgcccgcctcaactgcttcaacctgcaggccaataccccgtcacgggcttggcgttcacgagtaaaccagtcacagctaccgtagcgcatgtgtttttgtacgcgtctacgcggcgcggtctcacgtgttaccactgctcgcacgacgaccctgcgttggtgaagagtgcaggcggcgctgctgcgcttcccccgcgcacaacggttttggatgagcgcggtgtggatatgaattgttcttgtgtgaacgaggagggagagatcgctgtgggacagacggatgctgtgtacttctacacgacggaagaccgctctgtgtgtttcggctttgaaggcgagaagaagtatctgcgcttctttaagcactacttgttggtggcgcacgtggatccgcgtggacgacaccaggtgaatgtgtacgatctgcagaacaagttcatcgcgttcaactggactctcacaagtaccaaccccaagggacctatgcgcaaaccgccacttgcgccgaacgctcgcgtccccggcgcacgctttggacttgacgaaatggaggaagttcgtcatgtggtatgtgagttcggtgccatcttcgtcgtgtcttctatgggccatgtgtaccgcctgagcgagaaggacacgacgtctaagttggagattttgttccgaaagaacctgtactcgatcgccatttcgctggcgttcagctccaactacgatgtgaacagcatcatcgatatcttccgcatgtatggagatcacctgtatcagaagggagactacgatggatcgctgcgtcaatacgttcgtacaatcggtcacgtggagccgtcgtacgtcatccgccggtttctggatgcgcagcgtatccacaacctcacagcatacctcgaagctctccacgaaaaggcttttgctaatgccgagcatacgacgttgcttctgaattgttacacgaagctcaaggatgtcaagaagctggacaagtttattcagctggatgaagtgatcgatgccaagaagacgaagggtggcagcgattctggtgatttgactcccaggaatggaggcgcagcagccgccaacctcaacttcgacgtcgagactgcgattagtgtgctgtgggaaaactaccctcagcacgcgttgacgctggcgaagaagcacgaggagcacagctggtacctcaagattcagcttgaccacatcagctacgtggactctgaggactccgttgcactttcggacagcgaaaaggagcgcgtggctgatgctctggagtacattgagcacctgagtttttcggaggcagactcaaacctgcgcaagtacggacgtactctagtgactcacatgccgggacctactacggaactgctgaagcgactgtgtactggcaaattcgtcccgggtaacccgtcgttgaaatcggacccgggcgacttcttgcacctgttcgtgtcgcaccgcgcccagctgaaggagttccttcagtacattgtcgaggtggagacggtgagcaacacgtctatcggcaacacgctgctcgagatggttctcagcgacgatgatgagggtgaaaatggtgctcgctccgtcgaggagaaggaagaagcggtgctgcgcattctggacaaccctcgcgtcaagtacgacgaggaccacgcgctcattcacctgcagatgcatggcatgaagaagggtaagcgctacctgtacaacaagcttcacatgtaccacatgttggtacagttccacatcgaggagaacgacgaccagagtattctagaggaggtgcgcaagcacggagataaggacccgaacctgtggtcgcttgcgctcaaatatttcgcagagcgagggccgctgcccaagggggctacgagtggcgaggagtggaaggagctgaagcagttgcttgcccttatcgacacgaacccggcgattcctccgctgcaggttgtccaggtgctgagtcagtcacgcgagttacccgtgtcagtgatcaagcagtacgtggtgaaccagctggccaacgacgagaagaagatcgaggaggacgaggagaagatcaaggcgttcaagagcgataccaagcagatgaaggaggagatcgcgcagctcagcagtcgtgccgtggtgttccaggccaccaagtgcgacctgtgcaaccacgacttggacctgccagcggttcacttcatgtgtcaacacagcttccacctcaactgcatatccgagacggatcgcgagtgtatcacatgctcgatggaccaccgtcacatcctggggctcaagacgcagctcgagcagaaggccggcaaccacgagcagttctacaaccagctcgagactgccgcagatggcttccacacgatcgcggagtacttcggcaagggcattttcaagagcaacgaggtcgtgctagacgaaggctccttcgagacgcgcttcagcgccgagttttagttgtgtgaacgcaagcttctgtcgttttatttgtttctttgctgctttgtttattttactcggcctctgttggctccttcttccagcctcatgtcaagtcgatgacttcggatgagtctacttcttcttttcgccggcgcttacggtctcgctcgctgtttccatggctactggtgtcaccgcatgaaacttgtttgctcttttcttcgtcttcgtcgtccagcagcacaatcgtggctggagtagcaaagtccgatcgacgagttggtggtggtgcctgcgtctgaggtggtgcaccctcctcctcgtcatcgagaagaatgatttccggctcgctgtgtgctgtgtgttgcggctttgatgccgcagttgcagagtcatcttcctcctcgtcactgctttcgatgcccagcacctcatgcgaagctccttctcgcagcacatttctacagtgcttgttgtctcgacgtcgtctctcggcagcctccagcacctttcgacgtagtgcctgcgggtcgaggggcttattggacgcaccattcgatgtattcgacccaagccgccgacttgtctcgcctccaagcagcgagtgatactgcaagcaccaacagtaaccaaatacgtcagcagaagaacctttagctcataagacccccgtgtactgtacgcatccacctgctctctccgcttcgccgccaacacggccgcaactcgaatggggacgcctgcactgttcccaccaagtctctggcctgccccagcgtctgcgaacttggcgccttcttcgcccacgaggccgcgcaccatgagcgactccatctcttgcttcagctcgtccagatactggtagaacgcttggttgtgcggcccgtgcaccatgtgcgtgagctcgtgcagcagcgtctccagcagcgcctcatagggcaggaacgactggggcgatcgctggggtctcactgggcagtcagtccatacaccacgacacacaggtcgtcagagagcagcaacaccacactgcagagcattgcagacgccagtcgtacagcgcacgtagattttggcgccgcggttcacgttcatcccgagcaggcagccatccttggggaagaactcgagcagccatcgcactcggaagcgcctcttggtcaggatgggcaggacggcggcggcgaggcgctccaggagctgctgggcccgcgcgcgctgcggctgtggctgccggaccagcgccttgacctcggggatggcgaaggacgttgacatggctgattggccaattcggctacgtacgtacttatctcggtggtcgacaccggttcatgttgaagtcaacttctaacgttagcagtattatcgcgcggtgcagctacagtagactagatggcaagaaagaagaacacggccaagtagtggcgagtacaagcttaaatgaaacagagctcgactatgagaacttttggccgagtatcttgtgtagcggttcactggttgctgctgctttcgatgggcggacagagctcgcagccttcgcagcagcgctcgcacacaggaccgagctgcgtctgagggatgaggacgaggtctcctgtttgcttggacgtcgtcatgttcaggaactggctgatggggcagtcctcgtcggcagcctgccagcgaaggaacaccaacaaacagcaacacagcaataaccccatcaggacaggactcaaccatagaggcttgaagctgttgcagcgtctcaccgcaatgacgtgcggcacgtcctcgttctcgtcggcgaagtgtccgaaacagtacgtctgcatggcgttgggcggccagccgtgcgggttcgcggacgtcgcgatgagcgccaagacctcctggaacatgacgctgcgccggatcacgtctttggtctgcagcagctcgatgcgcggccgcagctgcgcgaaggtgacggtcgcgacctccttgtcgtcgaggttgagcgtgcccacaacgggcagcagtccgccctgcacattggcgcgcccgtcgagatcagtcaagcgctcgagcggaccagacagcaagtgggccagacacacacacgacagcgcacctcgatggtgccgacgacgtacgagttctgcttcctcgggtccgacgggaacgtgaacacgcgcaccttcacccgtaccattttggtgcggccagcgccaggctgcgagtctccaaggggcggccgttctcctcagtgcggatgagcgctggctgctgcgtggcagcttgaaaacattaaactactagtaccacgtagtagtatctaagaaagacatctacgcagacagtagtggccactacttcaaagtagtcgcaacgatgctcgagatactacgtctgggatgaaaaagtatcaaaggcatatacattggtgttgaaggagcctctcgcgagttcccatttacttaaaagtacactttggcttgtccacataaatactgtaacaggacggaagctgctgcgcggcgcgcgctgcttgttcgagtcacgggtcgcggtcgcctgcctatccaagggctgtggccccacggcctctctcctcgacttgctcactgagccggctgcagccgctccgctggtcacgacgaacgtccgctcgagtccgttcgcttgcttcagagcgcatttcgacgctcggcgggcgacgggaggcttagatgtacacccagccggagcgctcgaaggccgtggacgggtcctccttctccagcttggactgcggggacacggcgctgaagtgcttctcggcgggcgacttgccggtcatcgggcgggcgatcacgtgcttgagctggtcgaacatggctgcaattgtcgtggttgttgctggctttgtactggaaggcgggtgcttgcctcggctcaattgacttaacgtgctgctaacgacgcaaattgggaactgagccatccgagttgttgcatgcatcgactggaaaccaagcgtcgtttcgcacgctaccgccgaaagtacgaccccgcgagagctgatggacagcgcgcggctttgtcggctccccggctggtcgctgtgtgtgtgaccggtcgagaacggataccctgccgaagccgattgttgaagtcggcggggggactgcgcgctgattggctgatggtgatatggaagcgaacagagtgatagggacgcgtcacgacctggctgacaagtcttttcggaccagcgtcggcagcgctcatggcgcgtttgcatggcgcgcccgctctacgcgcgcggttctggtctccgtcccgcaatgctcgtatatcgcaggcagcgcctgcgacgcaatgcccgaggcagatcctgccagcctgctgcggcacgggagtcgacttcctaggccgggcgacaatgattttcttcaggcctgctagttaggcccggcgagttcgagatattggcgctatctatgcgcgcggcaaagatgccagcttcactcagcgactgctgacattttgggccccccaagcggaagcctcctaccggtacgagtcgcagacacgcgcggcgttttcccagcgaaagcgctggccggtttctctcgggtggcttcaagctgccgcggccagggagggcgcaccaaccagcggatgtccgccgtacagtgcgcggtcgtcgctcaatagcttgctgcagcaagccttgcagtcccggtctattaactggctggccccgatcaagctgatactgcgggaaaatgcaccgtcacataattggcgtcaaacgaacggctccttgttcttttttgtcaggcaggctctgtcgacgaagcgcgttgtcgaggcgctgggcaaagctagccttgcgagcgcgcttgccctgggctgcgctgcgcggggcccagccagcagcgccagcagcgcggagcgaccagccgactggccatttacatggagctaggtccctggatatccggcgatatgcacgttgaacccaaacagcagcagatggtgtcgtatgttgaagcagtgtaggggttcaaccatgtgcgccgcggcgactactgcgagctccgttgcggacctaaatcttaggacggccgtgaatgtaggccagcgagctcttcaggacgctgtcctaaggctttccgcaagctgttgatggctccttattggtagatttggaagtgatggttctagtaatcgtcggcatttttttctgtgcgttgggaattttcatcccaaaacaaacaaataaatgcatgtaacatctcgaacttgttttgtctggagaatcggaatcatgacttgccgagctagccattatgctgtacacaagagtgatagagtaccaggattcgagctcgatttacattgtaaatgattgtaaattttacaatctctctgagatcccaacttgcaagctacatgtaatgttactgttgctcaagcgagcggatgcaaagttgcaaatatgaatagcagcgatttgccatggtacgacgctggcacgcaaaaagtggctatttggttaatcaatttcagaagtggctagccggcaagcaaaaagtagctacttcaaaataaatacttctctggcccacctaagaatcgacatttctatttttccgctctaaaaaaatcaaaaaaaatctgtcggagacaaataatagctcaaaagaaagctgggatttgggggtttcgcgttatactattagctgctcaaaaacagcaggattaagggaaacagagcaaatttcgtaagcccgtttttgggtaacattaggtttttttgcgaaatggctacaatttttggcgatattataccaaatggtatcattggaaagcttagttagctgtcaaaacagtgctgtgcagttcgccgtcgtagaacgcgtgcggaaggtgtggcattcgtctagattttgaggtttttctaagcaatttcgtgagcttgtactctaatcaaactttgtacccaatcatatggctgaaaccgtatatttagcaagtgagttcgcaaaaaatgagtctaaattgaattgtcgattcttaagtgggccagagaagtacagttaaacacaacaacaaaccatattattcattaaatctccactacggtagttggccggtgctgtaatttactcacatttttcattttcatcttcattttgcaggtgaggtatactgtgttcatttagtacgaggtcctaacgatcaccaatatccgcagcgaacatccatacacgttgttagccgtatgagccggtcactcacaagctgcaatattgaatcgacaccatgcatatactcactttcgcagtgttcttcacgacgctccgtgttcggcccttcaccaaaaaggggcgctgtctggtgctggtaattgatgacaaagagaccaatgcaataagccgcagtaactgtccaccaccagcccaacagcttgcggaaagccttaggacagcgtcctgaagagctcgctggcctacattcacggccgtcctaagatttaggtccgcaacggagctcgcagtagtcgccgcggcgcacatggttgaacccctacactgcttcaacatacgacaccatctgctgctgtttgggttcaacgtgcatatcgccggatatccagggacctagctccatgtaaatggccagtcggctggtcgctccgcgctgctggcgctgctggctgggccccgcgcagcgcagcccagggcaagcgcgctcgcaaggctagctttgcccagcgcctcgacaacgcgcttcgtcgacagagcctgcctgacaaaaaagaacaaggagccgttcgtttgacgccaattatgtgacggtgcattttcccgcagtatcagcttgatcggggccagccagttaatagaccgggactgcaaggcttgctgcagcaagctattgagcgacgaccgcgcactgtacggcggacatccgctggttggtgcgccctccctggccgcggcagcttgaagccacccgagagaaaccggccagcgctttcgctgggaaaacgccgcgcgtgtctgcgactcgtaccggtaggaggcttccgcttggggggcccaaaatgtcagcagtcgctgagtgaagctggcatctttgccgcgcgcatagatagcgccaatatctcgaactcgccgggcctaactagcaggcctgaagaaaatcattgtcgcccggcctaggaagtcgactcccgtgccgcagcaggctggcaggatctgcctcgggcattgcgtcgcaggcgctgcctgcgatatacgagcattgcgggacggagaccagaaccgcgcgcgtagagcgggcgcgccatgcaaacgcgccatgagcgctgccgacgctggtccgaaaagacttgtcagccaggtcgtgacgcgtccctatcactctgttcgcttccatatcaccatcagccaatcagcgcgcagtccccccgccgacttcaacaatcggcttcggcagggtatccgttctcgaccggtcacacacacagcgaccagccggggagccgacaaagccgcgcgctgtccatcagctctcgcggggtcgtactttcggcggtagcgtgcgaaacgacgcttggtttccagtcgatgcatgcaacaactcggatggctcagttcccaatttgcgtcgttagcagcacgttaagtcaattgagccgaggcaagcacccgccttccagtacaaagccagcaacaaccacgacaattgcagccatgttcgaccagctcaagcacgtgatcgcccgcccgatgaccggcaagtcgcccgccgagaagcacttcagcgccgtgtccccgcagtccaagctggagaaggaggacccgtccacggccttcgagcgctccggctgggtgtacatctaagcctcccgtcgcccgccgagcgtcgaaatgcgctctgaagcaagcgaacggactcgagcggacgttcgtcgtgaccagcggagcggctgcagccggctcagtgagcaagtcgaggagagaggccgtggggccacagcccttggataggcaggcgaccgcgacccgtgactcgaacaagcagcgcgcgccgcgcagcagcttccgtcctgttacagtatttatgtggacaagccaaagtgtacttttaagtaaatgggaactcgcgagaggctccttcaacaccaatgtatatgcctttgatactttttcatcccagacgtagtatctcgagcatcgttgcgactactttgaagtagtggccactactgtctgcgtagatgtctttcttagatactactacgtggtactagtagtttaatgttttcaagctgccacgcagcagccagcgctcatccgcactgaggagaacggccgccccttggagactcgcagcctggcgctggccgcaccaaaatggtacgggtgaaggtgcgcgtgttcacgttcccgtcggacccgaggaagcagaactcgtacgtcgtcggcaccatcgaggtgcgctgtcgtgtgtgtgtctggcccacttgctgtctggtccgctcgagcgcttgactgatctcgacgggcgcgccaatgtgcagggcggactgctgcccgttgtgggcacgctcaacctcgacgacaaggaggtcgcgaccgtcaccttcgcgcagctgcggccgcgcatcgagctgctgcagaccaaagacgtgatccggcgcagcgtcatgttccaggaggtcttggcgctcatcgcgacgtccgcgaacccgcacggctggccgcccaacgccatgcagacgtactgtttcggacacttcgccgacgagaacgaggacgtgccgcacgtcattgcggtgagacgctgcaacagcttcaagcctctatggttgagtcctgtcctgatggggttattgctgtgttgctgtttgttggtgttccttcgctggcaggctgccgacgaggactgccccatcagccagttcctgaacatgacgacgtccaagcaaacaggagacctcgtcctcatccctcagacgcagctcggtcctgtgtgcgagcgctgctgcgaaggctgcgagctctgtccgcccatcgaaagcagcagcaaccagtgaaccgctacacaagatactcggcacaacatctcatctgttttaatgaagctgcttaattgctactatccttattgccatcacccacgacctttgcgtttactccgccatgcaccggaggcggcggctggatggcgtcacgccccacctcgacgctccaattgggcagcgacggatgcagactggcgtacatggacagctccttgatgcccgcgcgcacggacgctagctcctcgcggatcttctgcgcgtccgtgaggtccttgttggcgtggaactccgtcttgatgtcgcggatgatcgactcgcgcttgacgctcgggtagcgctgcgccagcttgaggatgcgccggtacatgcgcagcacctccttggtctccgccatcgtgctcactgagtagttttgtgttgtgtgcggcacaccacaagcgcccccattggtcgaagcccgcgtggatcgaacttcgctcgtcacttcaccagtcttcggcatcgcaccgccgaagccttccgtctcgccctcgcggcgttccagtccctctctctctagctctacacacgctgcctcgccttccccgtcgtctcctgcacttgtatctattgtacctatctccatatctatttaatccactgcccgccgcccgccatcatgaggtgcgtctctctgcgtcatgagcaaaggatctcctggccgtgggacgagcttattgaccgttgtgacttggtaaatagcagaaataatagcagtcgcaacaacagcaatggcggctctggacgccgtggtccacgtagagagcaggtgcgttgactggagcggtgtggacttggatcttgtagctgacggattggtcgtttacggatacgtcatgcagaagaagaacatggactacgaggctcgtgtcacgcgtaatggagtctccgccaaccacctgctcaacttctccatgcctgaacgcgagagacacgtgcaccaccaccagaagaaaaaaaagagctcggcgcctcgcacgcagagcgagtatctgcacgccaagtacgtctgcgatgaaggggttatgtcagtatctctatctaaaaattgctgttactgtgtgtgtctagctaccggttcgtgatcgcaccacttgatccggacgcggtcgttccaacgtgggatctggaggcactgacggaatgtaagctgcgtctcgagttgaatatgcgtgatgattattgtcgggttttgacaatcaatcgtgtattgcagggtcttcggttgagcaggtattgctgtggtatgacgtcgaaagcccgcagacctgcccgatttgtatggacacgttccgtgcaccgaaaattaccaagtgcggccatatcttctggtacgagcgcgtgatgctaaatggacgttgagcatcatttttgttgtatctaacggctgcgataccatgtttttcaattagttggccatgcatcctgcgctacctgtctatgacggacaagtactggcgtcgatgcccgatgtgctttgagtccgttcaaaaggggcatctgcgcagtgtgcagctccagcaactgcaagttccccctcacgtgggcgatgacgtagctttccagtttctggaacgccccaagtccagcatgttcccccagcttcgtgtcctccctcccgctgaagctaaaggggatctagccgggatcgaagctacttcgcactctgcgttgccttctccagacgctcctgcatttgcaaagcgtaaacgctcccggaagctgccgcgtgtggatgatgtcgatgcgacgtactcgcgcattctggaggcaacgcctgattatcttcgggagctcctgtactcggagatgcgcgatctccagtcgatggatgccgagtttcgaagtagtggggacgttgacaacctccctttcgtggaagaggctatgcggaatacctcggggcggcttgccaagagtgacgacttcagtcacggcacttatggctccaaccatgccaacaacgctatcggtagcggttcagctacaggcgtgaaaggaaagccgcatcaaaacgaaggtggcgacgcgtattccttctaccagatcgcgaatgggacatacgtggttctccacccgctgaacatgaagtgcctgctgaaggagtactcggacgagcaccagcacgagttagaaggcgatcacggagatgacgcacaccaaaaggagctggaagctgcgtggaccccgtcagcgagctcggagccgttacctgttgatcgctaccatttgctacccgagcaaatccgcggacgtgtactggacatcgagcacgtggtcatggacgaggaagcgcagaagcgctaccgtttcttgagccacttgccgcgcttctgcgacttctacatctgcgagctcgatctaacgtcgcagctgtctccgtcgacgctcaactcgttccgcaacgacctcaagaagcgcgccaagcagcggaagcagaagcagaggcagcagaacgcgccgtctccgtcgtctccgatcttcaagagcaatgcagcggcgttctcgctggagcaggaaggaatgatgtggccgtcgccctacgagcaggcgctggccgagtcactagaggagttccatctcactaatgcatcgagcgtcgagttcgagggtgaagtccacgcagcggccactccggcctcgccgtactccgacgacgtggggaggtcgttcgccagagtgacggagaactcggggtacttccccgtgctggggggcggaccgagcgagaccagggcccacgtgacggaccccattgcatttggatcgcccgctgcctggggaaacccgtccaccagtccgcccgcagtcgcctggagctcgggcaagggcggcaagaagaagggcgcaggcaagaagggcgtctccgtgttctcgaccacgcagcgccgctcgtaccgctgactttgagcagggctgcaaagcgacatggatacagtatgtggacgtagagctcagctgacgtacagtactgatgaagttggcctggtccaagttgatgatggtccagtcggcgtagcgccgccagtaattctttccacagacccgatgcccatacaaagtctaatgcgaggtacctctgtaaaacccgtcaaagattacgctaattcacgttccgtgttgcgctcattgacgtcagccggagctttcctctcattcctcaatcttctccgttgagcgcaagcccccaagccaccccaagaagtcaatccaaggatgaccaacgtcgccatcatctactactcgacgtacggccacatcgccacgatggccgagtccgtcaaggagggcgtcgagtccgtggagggcgtcacggccgagatctaccaggtgcaggagacgctgtccgaggagatcctgggcaagatgcacgccccgcccaagaaggactaccccgtggccacgcccgacgtcctcaagaacgcggacggcgtgctgctaggcatccccacgcgcttcggctccatgccggcccaggttaaggcgctgttcgacgcgtgcggcggcctctgggccgctggcgcgctggtgggcaagcccgtgggcatcttcttcagcacgggcacccagggcggaggccaggagaccacggccttcacgtcggtgacgttcctcacccaccagggcatgaccttcgtgccgctgggctaccgcagcccgctgctcttcaacatggaggagatccacggcggcagcccctggggcgcgggcacgctcgcgggcgccgacggctcccgccagccgagcaagctcgagttggatgtcgccaaggtacagggcgagtccttcgccggtgtggccaagaagctgtcggcctaagcccgcagtgctagcagcagcggcatgcgtcgataaccgtagctaacgtcattaattgcatgcttacgttgaacccattcctcggaaaagataagaacgcccctcaggggcgttcttatcagaggtagattggtatcaccgtacaaccaggtccaagtgtgctagagacgtgcgggtatcaccgtgcaacatgcacctcgctgataagaatgaaatgtatccgttcacccaatttttcaatagtcaactttcacctctactttttttttatttttattttttttagccgtagagagcgctagaaaccgcactaaaataggacaagacgacacggggtgtggagccaccacttgccgtcccctcttccagccactgcagcggtgaaggaaggtggcatggaagcacaagacagtcaagcaagtgaagagtacatctgatctgctttatggatgctgttttagcgacgtttttgcgcggaaatttgtagagaaaactgctcgcatacaaagcgctagtgtaacttcgggatgtgctatagatagcagatgcacgatgtatttccctagtgacttttgattggacagtttgttctgtatccctaatcatgtagtatctcataattaaggttacgcggtaccgcggtacgagggaattcaactgcaaaatttcgactttccccttcgtacaactgtgaactctttcaactttgacaaagttcatatgctaccatccgtgcaacctcgtgataccttgcgcctttctacgtcagggacgattacgctcgaaagttgttcgaggttgcacggatacaaccaaaatctaccaatctacctctgttaagaacggccctgaaatgggctcgcgggaaaatgacaacagacgtatgaaaacgagttttaaacgcagaagggtagctaccagctatccctatcctctaccgatctcaatcataccgcgcatacacgtctactgacaaatgagcacctaccataattaactcaggcgtccccctattgattccatgatattcgtgcttagagcaatcccacccgtttgaacaaaaaaccaaaactaaaagcgaacttagcttaggttcgtgaaagtattagttttcaagtcgaacaaaaccaaaacaaaacctcaacaaaactaaatttgctgcacatacaaaaaccaatataaatgaagcgtcgctactatcctgcagctatcccgcagctatatttgaccgtgctttagctccagatggacgttttctaacacttctgaagggtcgccctccttaactttattggctcgcccagtctgcagatttgactttagttttgttcaaacgggtgggatacataaatctgccacataacctcatataaataatacttcaaggtccaacaacaggatgaacggagatgcaaaggtactgatgtaaaaatccaggatacctttgtttggctaaaagtactaattgaaaattggcgcccttttgattgtctgtgcgatcttctctgtatttacgattccactttcacatttgcgcactacccgctaagccctctacgagtagtacaaagtagagctactaaccgcactgatgtggtgcgaacacgcttggtcgaaggtcagcgctgaaacaactcagcactgctttactcgggtttgattaactaagtaagcgccaaatcccgtctaagataaactaattcagtacgcaaactaattcagtaacgctgagatcactttataaacctagagcccttatatatatcaggcgttcggtattcaggcagagttctgtattagacacctcggtgttctgccggatcaacgcgtacatggtagctgttcatgcattgcaggttggccactgttctcacgcggcgtcacgggagggatcacagatctccaacgtatcacgcaagggcccactcaggtctccagactcagaggccctatagcccagggtcgccactgcgcgggcttgcttgaactccttgctgctggtggacacagctgcgccggcccctgaagacgtcgcgggttatcgtggctagcctttcgcacaaacgttcggtatcccttgattggtcgacgcatccatccaccagagtgaaggaccgaagcttcctccacttcgcatcgctatcagtgagcttctggcgacccgaccagcctccagaagctaacttgattgggactttcaggttgagaatgtccacagacatcaccgtacttgttcgaagccagcgggggttcaccaactaccacgccgtagacgtagtagctcacagtgttgtggagtagcggcttcacagaaatcgcggagttcgtcctcgcacacccccgacgcgtccaatctgcggtcgcgacgggcaatttcccggatcttgagtatcgtatcttcgaatatagagcccaagtcttcgcaagcttcagagttgggggggggggggggggttgagtggacgcttgttccttgttctagggcgtcggttgttccttgggcgtgcggacttatcgggccggcgtttccttggagatcccgtcgggcgtgcggcattatcgggccggcgtttcctggggcttgctgcgtggcgttatcgggtcggcgcggtgtcttgtgcacagcggttatcaggccgtgcggtccttcgtctaggctgcgcgttatcgagagcctcctaaccggtatacgttttacgtgccttcgtttccgacacggggtttgaggggggtgagtgcccgagccagcgagcgacggggggccgcgtattccttgcggctctgcttgccgacgcttggtggttctcaagaacctggcgatcttccggaggggaaaggtctgagtggttcagagaaatttcgggactgagtccttaccctatcctatgtccttgctactggctactctgtactactgcttgctaagcctaccgctctgcacctatccttacttctgtcgtgcttgcactaccgctcttcaacctgatttgcgtaacgtaatcacaacttgagctcgacgggatttcctcgacgggatttcctcgacggaattttctcgacggggttttctcgacggggtttagggttgacggggtttagggttgacggggttttggggtcgacggggtttgcatgaccgggcgtatgaaccggctcgtcgaatcaaccagaattagcctgattccgccgccgggatgcgtgtcacacggcccatcatcccgttaacctctctggccattccgacgcgtcgtattccatccgtctcgtcggctgccatctttcccggcacttcccgtcactcgttctctagcgcgacatctcgtgggtgctattccacatccgtcccgctgccacgcacgcgcactccccaggtgggtgtgccgttgcagaacttttctcgcacccgtcgcgccccgccctgtcgaagcctctcctgtcgctgtgcatcgccgtcgctcctctcaagtccatggtttgtcgcgaagacgtacgggctgccgacatagaggtggtcgacgacgaactcgacaccgaagacctcgaagctgccggctgtgccgtctgcgcgagtgaggcgcaccgccctcgtccccctgcgcgttttcccgtcacgcttccagcacctggtatgcggtggcggctctcgtcgccgacgcacataccctcgcccaggagaatcggacgctccgggctcagtatgagcttgtgtcggtgaacaatgccggcttggctgctcacgcttccgtgttgcacgatcggaacctcgctctccttcaccgcgcccgcgaagattatcaggcgggtttggtgatgcttgagcaggcgctcttgtctcgcgcgcgcacggagcaggctaacgtcgacctcgaagaccgcgtacgcggcctccgcgatcaggccggacgcgtggatgcggccgagacccagctccgggtgttcaaggcttcgtcggttgaggattaccacgccctccaggaccagctcgccgcctctcaagcgcaggtagctgacctgtctgcgcggctcgcccccccccggtgccggctcctccctcgacgtctacggtctctatggcgcggttgttcgccgcgctcggtgagcgggacgacgcgcgtgctgagcgcgacgacctgtgtactcggctagctgctgcggaagctgccctcgtccctgtccaggctcagctcgacgctgccgtaacgcagcgagatcgggtgcgacagtctgtcgcccgtcgagagcgacaacgtgacggcgccctcgccgaacgtgaccaagcacgtcgggatctcgttgcgctcgagcaggagcgtaacgcggtcgtcggggagcgcgatcaggctcggcaggagtccctcactctggagcaaggtcgtgacgctgcagtccgtgagcgcgaccaggcacgtcgagcccaggcgggagtggaacagcagcgcgacgctctggttgagaatctgcgcgtcactcgcaactcgcttgctcagagtcaagctgagactgagtccacccggcggctgaacgacccgctgcatgccgacatccggcgcgtgaatgcgttgctggttgcccacgccgaggagctccagcgcgagacggctcgcatacgcgagctggaggagacagccgcggctgcctcgactacacgcgtggtcgcagaggcagagacggcccgcgaccaggctaatgagctgcaggctgcctcgcgatccgggcagtatcgcaccggctggttggccatgcggcgtcggtcgctgcagcgaggagatacggccggcgcgcacatccgccgtctgagcgtccgcgtcgccgacctggctgacgaacgcgatctagcggtccgggagcgtgacgagcgtgcggtggtctggaggcgcatgcttcgagacgcgctccggagccgagagttggctcagcgcgtgcgcgacgacctggccggtaaactggccaactccgtttcgtcggtaggcggtaccatcgacaccgccgacttgatccgccacctcgaagctacctacgcagcggaagtgaacgctgccattccccttcctcctgccgatctcgccggggccacgcctgtggctgtgtccgtcgcgtcgcctcctgttgttgtcgctgggtcgtccgggtcagcccccagctctggcaccgtaccttcgtcgagtgttttggctcagcagccgtcttcctctgtcggtactccggcccctgttcaggttccggtgtctccctcggcttcgtcattgtcgggtacacgtcggcctcaacccagtggagccaggccttcaggctctccgcacccttcttcgatctgcgcagggctcccggcgacctccacgtcgagttcttcgccacggcgtcggagccagcgggcttctacaagggctgacaccgcagcctcgaccagcgcggccgctcaagcttctcctgtcacgtcgtcgtcgtcggcggctgtggctgcggcgcgtgctcgtgcagacgcgtctctcttcggttcggagtcctcggagagtgacgctggggcgcactctcctcagccaaaacgccgtcgtttgcgaagcccttcttcccgctcgcgttcttcgctgcgttcacgttctcgatcgacttcgcgcccgcgctcccgttcggcctcggcgtcgtgttcggcgtcgcgttcatcgtccgttcctcgtcgcgctcgtcggatcgccccgtcggctcggcgcgttccgcggggtcggctgcttccactcattcgacccgctcgcgtcggccggcgtcgccttcgtggtcggcacgttctcccacgcgagcttctcccacgcaaggtcggcgaccgtctcaggctggttcggcgactcactccggcgggcctgatgactccgacggcggcgattcgtcctcgtcgtcttctgcccgctcttcgtcttccagttccgtgtcctgtggctcggagggacccgcccccgtggtgccgttcttcgttccggtaatccccccggctggcacgccttcgggttggacacagcgtcgctattttccatggcccaagtccgtacgtcgtcttcggctccacaccatcacggctcgcgaattgcgagcgcgcttcttgccaccgcgggttggatctgcccccgcgcgcctgtccctgaaccggcgaactggaaccgagccttggtgacacgtgccaacgttgacgcgttgtacgccacgcggccatggcgctacttggctcaggaagtggagtcggtgctgttcgcgtcgggcgacgccgcgttctagccgttcatgcgtcgacttcggcaccacgtcgagcgctgggcacaggcgtactgggagtctactcatgagctccatgtgcctggcgctgcgtggcgttcgtggcgttcgtctcggaactcccgtcggtcgcacgcaggcgaccacctgaacagtctcctccagctggtggtcgacttgtttcgccgtgggctcgccgacatggacttgcttctggaccccgcggttcttcactttccaccggcgcacccacgaatcggacggtggtttccgggcctttagcacacgacgctgcaggaagcgctcgacgacgttgacgcccaggagccttggcgtcgcttccaccgaacgccgctcaccgtcgcgcagatggatgccaacgtgcgttgtcgcgtgacgcgtgcccaccacgcttacctcgtgcctcgccttgcaggcaagttcgtccagcaggtttgagcgtagcccgttactttggtgtagctcgtagccgtaacttcaatgcatccccttgacaccttccctcttttctttctctttttcacatcttttattatgagacggccctccgccgtcccatcttcagcaacaggctggtcctcctcacttccctcatccaagccctcgctccggccattcccagagtcgaggctacccaccagtcctcccgtcggcagccccccctgccgacttagtcgcacccgtgggcgctcacccaccaggatccgccgcctccgcgttctcgtgcgactgcatcgcctcgaaccggttgcgtcccgtgcgctggcgcaggaagtcgtacagcaacccgccgcgattcagatcgagctcgtcgacccatgtcgtgtccgggtagcccttccatttgacttcgaactcgcgtcgcgtgcgtccataccgggtagcccgcccctcgcgcacgttcacgatcttctcgacctcgaagacgtcatcctccagctcgcgcgtggcttcccagctatcctccggcaagagctcctcgtcgaagtcgaagcgctcttcggccggcaccgtcagctgcgtcgcgggtcgcgacgggaattcccggacgggcttcagcttggagatgtggacgactgggtacagctggtagggcgtacccgccgtctcgaggcgcactgcgaacgcgctgaccagctcggcgacgcggaagggtaggtgccacatgtgcgcgagtttgcgcgcataccccggctttacccgatccaggtacagccaaacttgcgagcccgtcgcgatctcatattgcgtcgtgttttcagtttgtcgacgcgctctctcttcgacggcctctcggactaactccaacgcttgtgcccatgccaccttgtagtgtcgctgaatacggagtctccaccgcctcgcctcggcgtcccgggtcgacgtgttcccgacggccagcgttgcttccagcgtcgaccgaggatcccagccgtgcactaagaagaacggggcttcgttcctcgtccggtcgtgcgacgtgtttagcgcgaaggtaagacgctcggcgtattcgtcccagtcgcgttggtcgacgtccgcaatgtccatcttgatcgctcttgtaaccgtctgcaccatgcgttctgcagcaccgttggcttggggacaataagcgagcgtcgctcgctgtctctgacccatgagtttgctgaacgccttgaagaagtcggacatgaagcccggctcgcggtcgtggcggattgcctcgctcgcgccgaagcgcctgaacaccgcctcctcgtatgcctcggccaccgtctgcgcggttcgtgacgcgttcgctttaaccacgacgaaccccgtgaagaggtcgacccagactaacagctctgtgttgcctttgtaggatgccggcaacgacggaatatggtccatggcgatgacctggaacgggtacgtcgcgactatgttgcccggcgactcgccctggatggtcggccgaccctttcccgtctcgcagtcggtgcattcgtcgacgtagcgctggacgcttctgaagatccctggccaatggaagtggcgcctcacgcgttggtacgtggggccaataccctggtgtccgccttccaggctcgcgtgatagtggtggagtacatcttcccgaagagtctccgggatcaccagcttcatcatcacatcgcgatcctcggcggaatcgtcgcttctcggctagtagtagagcagcccgccttcgccctcttcgtactgaggtgcaagcttttggcagttcttcacctcgcgccgagataggtctccgacgtcgccgcggagatacttcttgaggttgacgatccagacctcttcgtcctgggcgacgtggatgcggtccaggcgcagtcgttgcaccacccgctcctccaggacttctggaggacgggccctacgtgttgtcgtgcgtgcggcagccgagcgcgtcgtcaccgcgaggacttgtgctgtcccgcgtcccgcgtccatggccttcccggcggggtcatctgcgccgcgcgttttcgtgtcgcgattttccgcgtcgcgattttccgcgtcgggactggctggagacgccatctcgggactcgatgcccgtggtcggatgacttcttccaagcgattcagcgtcttcagatcttgaatctcttcggggctgtgcgcgttgcgacctccttgacgctgcagagcttgtccagccagcatgtcggcactcgcgttccagtctcgtcgtacgtggaagagttcgtggcgcggccatgcctggagtgcgtttcgcgtcttttgtcgcagcagcttcagccccggggacttgcagcccatctcgtcccgcatctgcctgatgacaaggttggagtctccgcatacaacgaatcgggtgacgtcgtcgagttcctctagaagagaacatccgagcagcagcccgcggtattccgcctcgttgaccgtgaggtccgtcgcatatcctgacgcggcgcgcacgatctcccagttcggcagctgccaaatgacagcactgtatgctccgccttctcgcttcgccttggccgatccgtcaaagctcaaaacgtgcaagacctcgtcgcgcgccacgtcggggactggaatgactacaatcctggacgcccgtttccgcggggcgatctcttctagcgccgcgtcgacgaaggctcgcggggtaatgctcgcggccagcgcgccgaggtgttcttcttctcccttcatggatcggcagatttccaacttccacggcgagaggatcgcggcccactgtgacagtcgcccttgtagtcctttggaccggaacaaccaggcgagtgtcgtgtgacgtgttaagacacggactggtctccctgctagcatcatgtagcactcgtttaagacgcgcaacagggccaagatctccttttcgacgatgtcgtagttcaggtcgttgggcttcaacgtacgactggtgaacttcacaggcatgtacacttcgtcgtggacctgcgtgagcacccctgatatggcccagttgctggcgtacacgatcacgacggattctcggttcgcgtcgaagtgtttcaacattggggtctcggcgagttttgccttgagcgcgtcgaaggctcgcgtcgcgtgcgtccacttctcatgcccgcggacttctggacgcgtgacgtactcgttgaagtcggtctccgtcagcgaatacagcgcggttacatacaccgcaaagtctgcaatgaaccggtggtagtaattgaggctacccaagaacgattgcaggtccttgagtgtgcgcgagaactcgagcaacatcagcgactccagattcttcgacggaaaatggagagaaccgggacgcaagtctcgttgcgatcggtattgatgaagatgatgatgataaacgtgatggacacccgaccgaggctttgatcacaagtctagcccagataagggggccacctcggaacctcgttcgggaggtgaaattactgcccggtgagagactggggtggtggtcgtcccaacgatacgacaagaggaagcgaatgagggctttggtcaatggcgcagtggacgacgcgcgaacgaggatactccttgacactggagcgaatgttagcgtgatttctaccagcttcgccatgtgcgagaagtccgggaccacggacgaagtctcgaagtccgcggcatcaacccagtggtgatggagacccggcgacgggcgctcgtcaagatcaccctcgggtgggagcaggtctacgaatttgaaatgtggataatggatcacagtgccggggtggatgtggtccttgggatggacttcatgatcccggctggaatccggctagatctatttcatggcgccgcacgccttccggacgaggtcatggtaccactgctaaagtcgcagagtgctgaagatgacgaaccttacggcacgcagccttcgtgtgggccgatcgaggatttatacgtacccggtcgcgagtggcgagagtttcaactgccgcgccaacggctacctcgttcggagtaggatgtgtgggtacgacgcacgggcaagctcgtgccgaccgtaacgaggtttcgacgggggcagccgacgtggatacggctcaccaatattacgaccacagcggcacagtgcgccaagcatgactccgtagtgctgtgggtacggcatggtgaactaccgcgagagaccggctacgcgaggttggactctaacaagtacaaagagtggcaggtgttggcctattcaacgagtcgtgatgagactctgcaaggacgagaacgtcgtctctacgagcaatggttggctgaacagccgcctgcggtcgagcgccgaacttacccgacgccgcgaaagatcctgccgaggccaccggatgtaccgccatggccagaaggccgtcaacaagctccgttggatgatgagtactcgtcacccgatgtacctggctacgacgacgaccccagggtcagtgaaggctcggccgatgtcgctcgagctgatacaaccgatgtggatcgtgctggtgggtcgaacgatggttcggacgacgaggccagcgcgtcgtatgactcggacgtacccggagactcgccgcctagccgagcgggttgcctgcccgtgaatccgaacagtggtgctgactccaccggccagggagcgacatacgcctcggctgaggcatcggaagccagtgatgagctgagtgatggtgacagcgtgacgaacgacggttcggaggatgaccgcgacgtggtagcagtggccgagacaactacatgggatgtcctgccaacagggaccgctgcgtccagcctggagccagaggaaacgtcggctgcggtgtgtagtagcgaagtcgactggggtaaacacgacccagggcctaacgacgttcctactgaagccggaacctccaccgctgacgccgacactgaattccatgattcggatctaagtgcgatcgacgaccccgagcagctactggaggcgacctatatctcggtcatgcatgccatggttgcagaagggtctggcgaaggtgatgacaccgtgaaagacgtttcggagcacgtcgcgaatgagattgagcttaccgactacgcgcaagagctagcgttcttgccggacctaaccgaagcgtcggagacgacgctggactactcggggcaaaacgtccagagtgaccaactcagcgtgaagcagcagacgaccctggtcgatgtgctgaagagccacgagaagatcatgattgcgagcggtaacgccctgccgcctccagcctacggggtcgtgtgtgacatcaatgtacaggggcacgcgccaatcaagcagaaggctcggcggaccccgcttcgctgactcggtaagctgtacgaattgctgaagggtctgttgaaggccgggctaatctccttctcggacagcctatgggcgtcgccaatcgtcatcgtcctgaagaagaatggggtggatatccgcctgtgtatcgactacaaactcgttaatgcgatcaccgagattatggagtacgccatgcccctggtggatgacttgctgacggacatggaggcgtacttgtggttttgctcgcttgacgccgctagcggcttctgggccattatgatgaccgaacgagctcggaagatctctgctttcgtctgcgcactggggcacttcgaatggttgcgtatgcctttcggcctgaagaacgcactgatgatctatcaacgcatgattgacaacgcgctttgggacttcgtccaaccgacgggaggatggtttaaattctcggagcgcatgcgtctagctgaagaacatgacaaggaagctcatgctggggtgaacgaggcttcgactggcacggcaaagccattccggaccaagttcgaggccgaccgagacaactcgcttggtaagggagctgtagccgaactggtcaacagccctatcgccgacatgttcgccaacggggagcccgatgactcctcgttgacaccagtattcagtcgccggtcattcgtggatgatatcagtttcggtgccgagactttcgagtcgtgcttggcgacgctagaccgattgctggcacggtttgaagagtgccgtattagtatcagcttcacgaagagcatctttgtgcagtccaaggtagacttcctgtcccacgaagtctcggcagaaggtatccgaccggacgctaagaagctggctggggtgaccgagcttccgttcccgtcaacgaggaaaggaatgcagtccttccttggggcactcaactattacagtcgtttcatccaagacttcgcggtctatggagcagcgctgtaccagcttaaggacgaggacttccagcccgggggtgacctcaccgctgccaagcacagcttcgcgatgctccaacagaaggtttcggcagcaccgacactacgacacttcgaccggaagaaggaggtgcatgtcatgttgttcgccaacgagtgggctctaagttccacgttgatgcaagagcaagagggcaaactacaccccgttcgcttctgcggacgtgttttgaaggatgctgagatgaattatcaccggccgagaaagaggtcctcgcgcttctgctgatactgaaggtgtgttatactcaactcgttggacagcgaatccgggtctacactcggttttcgacactcgactgggtccacaagtccaagacattgttcggtcgggctacccagttcgccgtcttgctgtcgccgtggcacctgttggtcgaacgagccaaagaaacagactgttcgtttgctctgctacttcaagccggcttgacgaacttcgttgacttggataagtcactggcgttggtcacaccccggacacgagggtcaccaactgctcgtttggacccgcatctgcttacgcacgcctaccgcggtcctaccgaggcttcgttatgtcgtttgacgggtctgcgaagaccgagaagaacgctggatacggcagttgctcgtggatactatggaagctaccagagtggacagtagtgcttgctgcgagcgcttacctcgagagcaccacggtcaacctcgctgagtacaccgggatgaacaacggcgtctctgctgcattacagcatggagccgacgatctagttgtcgttggcgactcgaggctcgcgatccagcaagccctaggggtgatagcctgtcggaaggagtcattgctgcaacaactcagccaccaccaagaactcacggccaagcttcggtcggtgaagtacctgcatgtggtgagagagtttaacgctgcggccgactctctggcaagcgagactctcgagtgcaaggagtctacggtggtatcgtcggacgaccgagtattagagctgatgaagctgaaccgtatcgctgaagtcatctacgaggctgctgacgggtgcgtcgtcgaggacataccctcggccaacacagtatgggccgtggtagcttctgccaaacctcgtagcaagaattttttcgattttgtgcgaagagaaaccgaccgcagacggcagaacgagactgaacccggacacgtagctgtgatgaccagacgtcaaacgagagcaaaggagaaacacgtccggtttgcagatgaagtctcggtcaccgatcagggagacgcatctcaccgagtagaagccaatggtgtgccgaacgagtctcagaatgaagcagaagcttcaccgctgcgtgccgagacgtcaccagccccaccgaacgcagaagacattgacccgctggtagtacaggaagaacgccgaaggagaatcgcctccgctcaagatgaagagttacggtgctcgaatctgaaggcagtgccccggggagatgatgcgaagattggatacagagcagcacgagatgcatggaaaatggcggaccaatttgtgttgagcgaggacgatgtgctatattacacaagaacgagccgtcgttcaagtgacggcgagcaagccgagttgaagatgagactcgtggtgcccacaacgatgatccaagaggtcctgcaaagctgtcatgactcacttgaaggcggtcatcaaggtattacccgtacgctacatcgagcggcgagagactattactggatcggtcagtatgccgatgtggagaaacacgttaagtcgtgccctgactgcagttcaagtaagagccgacctcagttccgcgggtactcgccagggaacatcctagccgagagacccttccaactagtctctatggacttcgtgataccgctaccgaagagtcgccgtggcaacacggctctcctgctattccaatgctcgttcacgggattcgtgatgggcaaagccatgtctgacactaccgccttactcgttgcgcaagctttcgaggagtgtgtctaccaacgttttggagcaccgtccttgatccgtcatgaccgagatcctcgatttatgagcgaggtcttccaagccttcgcggaaatgatgcagtctcggtcgagagcgaccctgagataccgcccgcaggccaacggccagcaggagagatcggtgaagacgatcatgcagtcagtccgcgtatgcgctgaagacccactacagcaggattgggacgagatcgccgaaagactgatcttcgccatcaatagctcccgtgatacgacgaggaaggaaactccgttttacctcgttcatgggtgggatgcacagtcgacgctcaaggcaatgtcctcgtcactcaaacgaggcttcggtagccaaactgatgcgctagcatggcgccgagaggtcaaccgacagcaggaaatcgccctgaggatggccaaggagtacaagccgcggaaaaggctcgaagagctgaagagcacaatgcgtcgcttggcaggaaggagaaggaagccatggcaggcgtcaacgagaatagaacctcggtcgaccgggcaccgagttcccctgaccatagtagagctgcagtgacgagaacgaggttctctttgcagcccgggagcagagtgtggctgtacatggagcgggttcgaccaggactgaccaagaaactagcccatcggtggcacggaccgttccgcgtgaagaagattgatgatgaaatgggtatgcaagttgtcgacaccggatacccgcaggagaccgggtgtacagttgtcaaaattgggctgtcatgcgaaaacatacccgcaacggagctagcgtaagtacgcccggtctcccgcgaatcaagtccggtcttcaacgagcataaagcccgatcttcttgcagggagacaagacgaagcccggctgccgcagctacgaaccaagcctcgtttgaggcagccacagcggtcgagggcagagaagaagctctgggaaccgcgaccgagtattgaatgcgatgtgcgttgacgcgagaaaagattatgaaatggaacgaacaacatgacgttattttggattgggatagcacatgcagcgtcgcctaaagcgccacggacctcggtcgacattggaaaagaacgtgaacgaaacggtgaagctggagcgtggcctaacgaggctaaatctccatcacagcctgagccaacacgcccagacttgacccggcggcggaagaagcatcacccgactccttcgtctcctcatcggggcttggagagcgagaacgacgagcgtttgcgaactcggccacccatggagcgaccaccatcgaagtccgcagagaagattcgaccacgaccgacgacgccacggtttcccgagtcgatccgttggggacaaacaacgggacgtcgttgcaagccgtgttgtaggggtggtctgctggcgcttggaaccaacagttacgccacggctcgcgggcatccacgtccgccacctcggaggcccagtcgtcggtagtggggacccactcaatcacctcgaacgagtattgcaggtacgacggctccagcaaaacctcggtgcggtgctgtggaggttgtccgtcttacgtaatggccccattccacaccttgtggagcatctggtctcgcaagcgatctgcacgataactgcgctctcggtggtacttggaccacgcttgtcgaagcgctaggacttgcacgttgcgctgaccgagggtgctggcgaggttgtcgatatacgccttgacagctttacccctaagccagtggcgacgctcccacaaggcgaaaccaaggtcgcccctctcggtggagtggtaggagtacccctggaactgccgccataggcgaacgagaagagcccgaccagttgcacgacgggatatagccaccgaggatggaaaacccgtcgtatcgatcaaacaaggctcgtctgggaaaagctggcgcaacacttggaaggggtgagcaggatccgtccacaagccaaactccacgattccatccactgaactgggggcgaccaagtcgtcctcgaagacgagggggacactggcgttttggatgagatgccagcattccgacgctccgggtgccgtgaaacccggctccaagaacagggtagcaagaccactgagcttacgcgatccaggagctacgtcggaagcgtcaaccactgctggggcaatcgacgcaggtccagccctcggtgaagctgtcaccgttgctgttaccatcgcccgagcgtgaacagaggccgaccgagtgtggagtcgactcgggagtggcacggtggccgcttgtggagctacaggaactccggtcgcggcagccagaggagaaggagcctccgaaggagcgacaggttgcgccaccgaggtttcctctctttcgtcggggccgaacatctccaggaacaacgctgcgcggtcctcggaagtctcggactcatgaggcgactcaccgctaggtgaatggtctggcgggccgccagagccctcggcgaccccagcagccgattctcgaggggcacggccgacgccggctataccagacgagactggcgaaggaatggaagtcgccgccgaaggcgaaacctcgtatggaacctcgatgacagtaccggaaggctcggtagcagaaccttgaacaccctgagcgctggccgacacccccggaatctcgccgggctcaaggtcatcttgtgaagagtcgctaggactcataccccctccaaactccacgtcagacgattcttgctgctgggctggggctggcgagggaggcgaggcgcgactggccagccgaggatacaaggggacgtctgagtgttcgtacgggagaggctgagactccaaccagcttgagcgagccgtcgttggaggacgcaccatcgaccgaggaggcggggaaatctctcctgatgccgaacgaggattggatggcgcggcggccgctgcagcccgggccctcaggtcgactgacggtctgccgaagcgtttgtgaggaggaggctgggatgccgtattcccgacggaagcagactcggtttgccggcccgcttgcgcgatgacgactcagtggagaccggggaaccagcagaagcgtccaccgaagcagcggcagcggacgtagcctcggtggactcagccatcggcacgtcggtcgtcttggactcctctccctcctctgacgagaattcgtcatggcgtggactctcgacagtgaccgtcggtggggacagcccgagaagattccaataaatctctgcggcggagatgccggctgaggccaggaccaaggtgtcgacgtcgagtccgtgtgctgccgagtgccgatgaaggatagaattcactcgccgcaagctgttgttctcgtccgtcaacgcttgaatgcgtgcggggatgacgtttgctcggtcgcggtcggccaactgcttccgaagcctctccaactgagtgttgtaggtaacgaggcttgcacttatacgctcgtggagctgggtgttccgacgtacagcagcggccgaatcggcctcagcaacgagcgtccgcttctccaacgactgagtgacgtcagcgtggtgagcgatggccgcgttcgcttgcaccaactgagcgctggtgttgctgagctggacgcgcatgtccggagctggtgctgnnnnnnnnnnnnnnnnnnnnnnnnnnnnnnnnnnnnnnnnnnnnnnnnnnnnnnnnnnnnnnnnnnnnnnnnnnnnnnnnnnnnnnnnnnnnnnnnnnnncaccagctccggcgcgaccccctacagctgcctcgcccccccaccgacgccccgcgagttaccaacatgaccgaaggcgcgggagttggtgacggtggagcgctggcgcttggcggcggtgtcggcggcgagtcgggagcctcttcactgggaactgccggcgagggagtctcggtcgccccagcagcagactcaggactacttggaggagccggtggagggtcgaccgaggtcctggaggcggcaggaatgagcgtagggtcacctgcaggcgcggccggggctgggggcacagcaccagcggcgataggggtgggggcacccgccgaacgagcctggcgcgccggacgacggcccgaagtgtcggtggcgacataaacagctccctgagatgatcaagaaagagatggagtcaacaacgaggatccgaatgacagtgagggcagcgggagcgacgaacgtaccggtccggagcactggagagcccgaagagcagcggcagccgcgtcggcgaatgcacgcgacggaggagccatggagtcaaagaactgaggacgcctagacgctcaccagcgtgggaggctcgcgtcgaggcgggggcagttgtggtattggaaagtggcagtttccaacgctgttgacccgccagcccgacaatcaagttcaatcaaggggcgatcaaggcgaggtcaagcgagagacggagatggctgcttttgattggatgatgacattatcctcggtagagtgacaggcagtggccgaagcctcgtcgggtcctaataggaggcttcatggtacccacttttaggtacagatgcatttagttacgtacttcggccgcacttattagggtagccgcagtcgtcatttgatgtgtccggaatcgccttattgcgatcgttcacactagatatttgtatagggacataggactcatcataggatggccagaacgaggcccccagggcctcagaaaactcagtaataaaaagacagtcttccccaaagccaacaagggtcaagtccgacttcggtaagtgtagctagcttattgttgtgcctggacacgctcggctgcgtgtggatgcctgtcggggagcttatcgtgcattgaccgagagtttccttggcagcgccaagagttcctgccggagaggcaggaacggtattagagtatcgttcagtatatatttgtgggattagagtgtccctgagtgtattagtctacctaccgaggttttaccttggtccccctgtataaggcctaacacgccggtacccttcctttctgagggactgcagtggggttgcgcgaaagcgctacatagtatcctacccttagctcgtggctagcggtacaggtttttgggttgaccgaagacaacctaaggtgcacagaggcgcttgcaaccgacccggtgtaagggatcgttcctggtcttcaggttttgatccaataagcgcttacctttgcgggttagcgtgttgttggtgcctttaataccttttggtagaggaggattttaatggaattaccacaccacacactcaactgacacgcgcaccttactcatgcttttgttgacgcgcttctgatcggtagttagattcgcaatagcccccccccaaaaggactcgatagaacgccatccttcccatatgcctgatcaccggacactcggaaagacttgaatcgaagatcatttctgatgacgtcggcaattccagaatctttgtacattttgatgtcgtggttacgcccaggaaaatgaccatatagatgagtgataagtccgtccggtgtcgagaaagtttggtatttgagcgcatgcttgcgcttgtgtccgttgtagacggacttctggctcaggtatttgccgtcacgacggacattgcgagctgttggacggcaaattcctcttacggttccatctacaaacgcccagacaatttgcagtagcccaccagcatcaaaaacagcgtcggcgtacgcttgtaagttctccgcagcgtaatcgtgattgaaatagaggaggtccgaaaatttgctgtcgagcaactccagcacgtgcaagaacaaattcgacaaaccacacgaattccgaccaaaaaatgactcaaggtcgctccagcgcattgggactgccaacttatacagcacaatgcatagaccttcgacaccagtagctgccgtacgctctcgagttcgaatggcgccgaggtcgaatagcttgacaagggtagctagctgcgttttatcaaatcgaaacttgtcgatacactcgtcatttgatagtccgttaaagctgaacggagctcttggtagttgttctgactgtctgtcagcacacaggaatgttgagatagcagcagccacgatgcattcatcacccttactggcttcgtgccaaatgcgtaatagatgcgctcttttttggtgccgacgaagaccccgagtgagtcaacgtagtatcagcacctgtgcgccgtcctcgttgcattcgtcgctgtctgaccagcttattgcagcggtatcctgttgagctggggggcttctttctgctcgtgtgctgatgtcgctgatgtcgcttgcactggtacggctcgcggtcgctggcacaggcgttgatgtcatggcaaagaggaggtactggagctcaaacttacagagtactacatgagcgtgttgtgaatctgttcaatttaaggacggtatagatgcgatttaccagccacagcaaacagctggttttcaacactgcaccgttaaaagcttgttcgactcgtgggttccggcaaatcaacttgtggaaccagtgcgtttcactgcgaaattggtggaaccggccagctgttgaacacgcattttaagaattgacggttttgctaaagacctctaatgaagagaagggtcagggggcagcaagtgatgcagtcaggccgcgtcacactgttgcccggcaccgccaccgccttgccgaaagatggacacccctcgcacttggccccgtccacggcgaccagatgcagcggagccaggagcaatacgacactctcgctggagtcctcctcttcggcggccacgggcaccccggtcaccatcagcaccacgcgagacgtcgtgtctctcgcccaagtcctcctcctcggcggccaagggctagcgcgtccagcgcgcggatgatgacgccgtcgccctcctcctcggcagccacaggcaacgcgttcgtaggtgcgctacctctgcgacccaagcttgaggtcttatgttcatacgactgttgtaccttggtggcatacgccttcagcacaagttttcgcttcggtttcccgcatacgtgtactggcacacaaattaagggtctgtatttaccgacaacattcatacgtgtactgtcatttctcatgggtacaccagaccggagagaaatgttgcacatgaggtggtccacaccatacttcacattcacgcctcttcgacgcatttaccattagcaacgtgttggccgcgcttcgctggcaccgcggcagcatggagtcgttcctggagccgacgtcggcctacgtgccgcccgaggcagtggcgctgttcaactcggtgggctacaccttcgtggggctggcgctgggcctcatcgtcttcctctgcgtgcgcaagttcctcttcttcctcacgtggcgcagcttccgcgacgggccgtacgtcgtggggcagcaccagtggcgcccgggcaacttggcagggtgcgaggcctacatatacatggtatgtcaatgaataataggttgtaaactaaccgctgttgcttctgcaccgcagaccgcagtggtgcaacgtgtgcgaagccatcgtctacggcatccgcagctacgtggtcaagtgcgacatctgcggcatgtacgcgcacgcgcagtgcgcggccactacgatgcgctacaagggcgtggctgggcctcctgctgcaggtggttctgcgtctgcctcagcgctgccattggccccgtcgtgtgtgtgcagagctgctggagtgctgccgcctactgccgttgcgttggacgagaaagatggaaccaatgcattgagctccccccagcaacagtgtcacatgtggatcaagggcaacatcgacccgatggactcgtgctctctctgcggcctcttctgcggcagcatcttggcgctgtccggactcaagtgcgcctggtgccacgtgcgagtgcacgaagagtgcttccagcaggcgctggcacgcgcgcaccggccgccgctacttcgtcgctgtgacctggggcgacacgccaacctcatcctgcccccgtcttgtgtcattctgcacgaaccggtctcgattgcgaccaagtcgcagcgggcgctcaactcggtgcgtagtgccgcgcacatcgcagtgaccaagatgtccaacatccgacttcgacgcggcgctgccagcggtacaggggagcaagccacaccaccgccaagtagttcgcggggtgaggccactactgggtgggaaagcgcactcgcggctgcatccaacgcagtctcgggatcggacggcctcccgtacgacctgctcgagactccgaaggaaacgaccccactcttggtatttatcaacagccgcagcggtggcaaaatggggcttcacgtgctacgtcaagtgcgaaagtggctaaacccgttgcaggtgtatgatctatcgcatcagagccctattgagccactgcgtaggttcatcggacttccgagactgcgcattttggtctgcggtggtgatggaacagtcggttgggtgctgggcgctctggacgagattggcgctatgcggcagccaccaatcgctgttctgccgctcggtactggcaacgacttggctcgtgtgctcggttggggtgcgggcttttcggctccgacggacgtgagtgaaattcttagcgaggtggaggcagcccacgtgagcctgttggaccgatggcaggtgaatatcggcgactcccagaagcgtgccgttctcaacaactacctgggtgttggtgtggatgctcaagtggcgctggagttccatgaacagcgtgaacgctcgccgggtttgttcatgagccagtttgtcaataagctgtggtacagtcaattcggcgccaagaacttcattgtccggacgtgtgctggtttgcccgaaaaaattgacctcgtgtgcgacggcaagcgcatcgcactacctgaaggcacggagggcgtcattctgctcaatatcaacagctacggcggcggatccaagctctggcatgacgacgcggaatctgataacgaagactccgacgccagcgagaccgacgacgacgatgaccgaagccgggcgagcagcatcgacagtatcgacaccagtagcacgcacttcggcccctcttctccccacgacggactgctggatgttgtggctgtgtatggcacattgcacctcggacagatgcaagtgggtctgtccaaggctgtgcgtttgtgtcaggccaagacggtgagtttgaccctgaaagaaacactaccggtgcagatcgacggcgagccatggctgcaaaagcccagcgagatggacatttccttcttgcaacaggcgttcatgcttagccgcaccgtcgaagagcgcgacgtggtgaccaagaaggtcggcgaggtactggactgggcagaacacacccacgtcatctcctcgagacagcgcgacatcctgttggtcgaaatcgctcgtcgagtcgctgacagtgccgcatctcgccgacacacaggatctcgagccttagtggcaactcatgacagacattcgttcgtcatggataagtaagtagcatggcaacaaggaactaaagaggccgtcaagtaaatatatagaagttatctatacgtcactctcgttgctgctggacgcggcttggtgaagcagcatcttctcgatgaagtgatcgatgtcgccgtccagaacctgcgccgtgttgccttctgagtagttggtgcggtggtctttcactaactggtacggatacaacacgtaagaccggatctggttcccccaggcattttcaccaagaccctgcgcaaattgctgtttcttgcgagcttcttcatcgagcttgcgctggtagagcttggcccgcagcacggctagcgcttcggccttgttgcggtgctgcgatcgctccgattggctctgcaccacgatgcccgtgggcaagtgcgtgatccgaatggcactgtccgtcgtattcacgtgctgtccgcccgcgcccgaggatcggaacgtgtcgatacgaaggtcttttgtcgagatctcgatttcctcactcgaccggccttctgcagccatcgggtacactcgaacttgagcaaaagacgtgtgcctccgacctgcactatcaaacggcgagatacgcacgagtcgatgcacaccagcctcgcttttcgcccacccgtatgcatatgcgccatctagccgtaacaccaccgatcggaatccagcttcttcccccacagactcgtcaacgttttgcacctgaaagccacgcgcctctccccagcgcgcgtacatcctcgccagcatcgccgtccagtcgcagctatcagttcccccagcgcctgcctggatctccaagaaacacgatcgagcatcactctcatgcgacagcagcaactccagtctgagctgctgcgcatcagcgtggactgcagccatagcgttcacacactcgcgaagcatcggttcgtcctcctcctccatcgccatcaggtgcagctcctttgtatccaagaaccgacggtgcagctcctctgcccttgtttctcttgactccagtgctcccagtcgttgcaccaccgatgcagcgcgagtcgcgtcgtcccaaaggtccggagctgcagcctcttcgcgcagctcagcgagttcttgcttgttctcagcggtggcgaccacgtcatggatcacttcaatctcccgcttcgcttgattcgctagcgaagtgaaggattcgccgcttgtaggcgcttctggggacgaaaaccaccgggccggaacagcggaggtcgagagcttcaatgggccgtataaagagaaatacccgcgtgatggaacccaaacttcgtgtgcagcattgcaggacacttgaaaaggcacgcaattagctttcgcattggcggaagccttaagggccgcgctagcgatggcggtgcgagcgcggcggggcaggaatcgtcggagcatttgacaccgtcaaaatatgaatttgcgtcaaccaatttgtatccgaaatttcatgctagagtttaggttgcgacctacattttcaggttgaatgttgcctttttcacatggcaggttaccgcttcggggacgcgaattgtgagaagtgatacgcttcctggtgcgctacaagcacttcgtcatcgatgaggcgaggcaaaaagtccgtctcgacgttgtactcgtggaaccgacctccgggttcgcacagctcgagcaccagcggagatgtcttgaggccaaagacgttcccccagagcagcaggcagcgcagacgcgatccagcttcgggtttttggggcttcaaacaagctgtcgcgattgcagccatgccttcgtcggtgagggatgtagagcagagtgacaacacctccagaggcgtggccatgttggcccggagcacctgtgcaaaggccttggcgccgacgtcaccaattcggttggcactgagatcaaactcggcgagcgtcgggtgacgcagcatgagtgctgcgagtgcagaagcacctgaacttccaatcttattggcgcggagtacaagccgccgcagcgaccggttgtccagcaagcgttcggcgagcacctgcgcgccgtgatcggagatctgatgcttggccaagctcagattcgtcagcactcgattcacttgcaacgccttgccgatgtactggattgcctcctcctccttggtgcgtatgatggggttgtccaggtttagcgcctccaatctgcggttgacacgcagcgactgcgctatggctatgagattggagacgtcgagctccgtgttgcccacgtcgacttcctgtagtgggcacgaggtcgacgcaagtagcgctgcgatggcgtggcctcccattggcccaagcggattcccattgaggttgagccttcgtagtggggaagccgaccccgctgcgtcgagtgctgtacagagcagtcggcagctctcgcttcctagtcgattgcccttcaggttcagctcggcgatctggcacgggtacgacggactaggctgcagtagacgaccaagacttgatgcggtttccagaagatactcgcgctcgtcgcgtgctccttcctcgtcctcctctcctccattctcagtttcgtgctggccggatgatgcgtcctcgtgctcgccaaggttgttgtagcgcagatcgagaccaataagaccaggcacattgctcttgtgcagggcgttcgccagcgccactagctgaatattgcgcagccgatggtggaagccttcgcgcgtgttgcccgccagcacaagcatggcccccggtctctcctcgcgcttgaggttctctgcagtgcgccgagctgccagcgcctgcgacgtggcctggaagttgctgctgagcccgtcgtcctcgggtgacgggaagaactccatcacgcgcatcatcacatcccgccgcgccgtgatccccagctgcagactctccatctcgtagttgtgcacgaagtcctggagcgacatggcttccttcctatctcaagctcttctctcaattctgcagcaaggctattgcgcgtgaaccgacgcgtctcttcatcggatacttgagctcatagcggttcattctcgagcttgatattaacatggtggccaagccgaaggcctccacggcagggcaagctgacaccaaagcagcagcagcggcagccgctgctgcagccacagccagcgcagcgaaaccggacgaggagcagccagcagaggaggaggacgaggcggtccggaccggcaccttctcgttcagcgacggcagcaagtacagtacgtcagcgtagcattagtcaatgagcattaccttctcctggagttgatctctcatgctcgcgtgcgctacagagggcgagtattgcctggtcggtggaaaagtggttcgtcaggcccacggctccttctggacgggggctgagaaatatgagggcgagtggctgcacgaccagatgcacggccgcggcgtgtacacctttgctacgggcgcgatctacgacggagaattccaggccaacgccttccacggcgtcgggagctaccgctgggccgacggcgcgcactacgagggcggctggcacttcaacaagtatggacgccaacttcaacttattggaccaatcatggggctgggatttatttgtggaacttgtttgtggtattgttttgctgttagaatgcatggagaaggtctgtatgtggacaaggaaggagtgcggtggcaaggccgcttcttaaacggcaagtaccacaacggtcgcattttccacacgttacggtgaagaagaaggagaaggaagaggaaggcacgatacgtagcggttgtggcaataatatatattcttatagatggcattcacttcattacgggaggaaagtctggcacagcgccgagccgctgcggtccaccggcggcaagaggccattctggagcatgtccagctcctcctcggcgacgctctggtctccgtagagctggcgctcgttggcaatcagttgcgccatgaagcctcggttggggaaaataaggggccggcacttgagcacgtggctgtaggcggccgagagggtgcacttggtcttgagcatgacgtaccagatgcagatggtggacgagcgcgagaccccctgcacgcagtggatgagcacgcggccgttctcctcggccgccttctggatgaaatcgatagtgggtccgaactcctgcgcgatatccacgtccacattgtccttgatggccacatccaggtactcgacgtggtcgaacttgttgcgctggtcggtgatggcgcccatgttgaccacgtgcgtgatctgcagcgcgtcgatcacctcggccgagttggcctgccagaagttgcccaggtacaggaacccgtccacgatttcgttcgggaagtgcatggacgaagtgggactggccactgcgttcaccgatgcctcctgctgctcctgcttccttgtgttgctgtcgctgtcgttctcctcctgtgaatcccgcagagtccagggtgacgacacgagcatgaagctgtacttcttggcgaacgcagggaagccctgcgccaagaaccggaccgaaaagacgcggccctcctccatgagcatcttggcgaagcggtagccccagtccatccggtagaggaaggacgcgcccgtgtggttgccgccgatgactaccacttcaatgaggtccctccgctcgagcttctcgcgcagcttgtcgttctccgtgagctccactacgtcctccaccgtcttggccatttgtccggcgcagctgagcgccgtcaggtgcgggcccgtgtggatgtgcgggcagtgcagcgcgtccgggaggtggccggccatgaactcggcgcctttgcggcagtcgatcagcacgacgcccgacgtctgcaggcggttgtagagcgacgtgaccgagatgagcggcacgcggctgtgcgagcgcctcctccgcagcttcctcgaggcgaacgagaggcacgaggagctgagcgacggcgcgtgcgacccggagggcgcctcctccagcactgggtcggcgtcggcgatggcctcggccgagcggctcgagcccgtgacgcacgtggagacgccgctggcggtgccatcgaacggcttttgcttcatgccctgctgctgctgatgctcttggtgtagatgctgctgctcgggctggaccatggctacttcagtatgataactctattacgtggcgccaggcaaaagcgaggtgccgccgacgccgacaattgccaattgacgcctgccgacaggcatcgtgccctctgggctatccccaatcagatctgacaggtccatccagaagctaacagtagggggccccggaatcgtacgatattcattctgcgaggcttatattttatagtcagcgagctagtcgggccagccccggccctgttcccataacttgtgggcaatcgcaatggctaccatacgcgcggcattagctagcggcggcgccaaactcagatgaacggcacgcccagccgataggtggctcggatgctcggcgcgaagtcttctttcgtccgcatggcgccctaatggagcgccacgctttcttggcagcagcttgcagctgggtcgccgccacccacggagaatcgccttgcgcttcgacttccacacgcatatctgcggctgctacaatgcaatggggtcggtgaagcgggtgcacccggttggccgcgtttcggtgcgctcgtcgcgcgctggacgccgccgctttcgttgacgagcaaatccgaggcaaaattgtggcttacaccggcgccaccgcacgcggggagcgctctcgtggctgtccacaggggaaaactgacttcaagttggtgcattgatatgaggtacctttggtctacactacttagcctacctacatcgtgctagtctacgttgaagacctgcttggtggcctcgtacgaggagatcatgatggcgcacgcgggcgccaccttcacgatcctcggcgccaggccggcagccatcccacgagcgccctcggacgcccacatctgccgaagcagttgccggatcgagggcgccggagccatgtctttggagaacacgaccagctgcgaccgagtcttgatcacgtcgaacgggtgagtgatgacagtcgcgagaacgccagccagcacacccgagatgaaggcgaccgagacgcgcctccgctgcgggtccgcaatggggactcgatccgtcaagtactctttggacgtctcgatcccgaaccagtagaaggccgagaacgggatgtccctggcgagcgtggcgcctaggccggcgaacagctgccgagctccaccttgccatacctgccacacgtacgtcgcaaatgggtgtgcgttggcaactgcttgcatctgcactcggatgagctcgaagggcgagaagatcgtggcggcggccgcgcgcgccgtgctgcccgacgccattgccagcagtccgtgattctgctcagggaacgtcgtcttcaagcgcttgaggagcagttcatacgacgtaaagtacaccgcagtcgacgggatggccgtcagcagcgtcggcgggagcccagcatacagcgccagcggtccctcaagccgcacgatgcgggccatcgtgaacagcgtgctgtccggcttgggcggcgagaagatctgttgcggcgagcacttgcactgcgtcagcagccgctgcttgggcagcatcgtgtccatgagcccattggagaagctgtagtacggacactgcgcgcacacgacgtccagttagtcatgtgctgattgccaagagctggtcggcctgcacttggctggccagcactggtaaacagaggcggttgaccaaccttctgcacggcaggcggggcatgcacgactgctggagcctgcacctgcaagcgcgtcttgaccacctccaacgctgcgcaagatccaagcatccacgatacatttacgcttgcggttagccttccataacgctacgctgccttgttaaacctccaagcagctgtcggtcttacgcgtgatctacaatgccacacgcgcatcggtggtcccgacgttagagagactagttgatcatgcttatcctgcgcggctggccagctgcacgcaccacgaaggaggtgatgaaggcgcccacggacgccgcggcggactttttggcgatctcgtccatcgccgctcctttgacaagcgttgtgaccgtctatttttgtccaatccagacgcgccacctcttcggattggccaaaacttctaaaaaccgaaactgtagccatgtcacgtttttgcgggggagctgggggccttttttccgtgaccagattgcagagagattcccaacggatctccccgcatatggtaatttgtatggtggcgcccagtgcggagccaagtgaccaagtggtcgctcggcggaaaagctttcactcagtcgccgcccacagtcagagaggaagaaaccactcgcgatgatggaacccacggcctccacgactgcggcgcccgctgcgcccgcccccgcccccgccgccgccgacccatccgcagctgctggaggagaaggtgtcgctgccgccgccggctcggccacggcccccgcccaggagatgctgcgccagttctcgacgcagttcaagtcgcagatctcgcaggtgcagatgcccgccgccctcaaggagcgcacggacgagctggagcgccgcatctccaacacggacatcgcgcgcatcaatggctacatgcgcctggtgaacctcgtgttcgccggcggcctgtgggtcacgtgcttcttccgcatgttcgaggtgcccagctactcgcacttcctcgtcatcatctacatcatgtacgtctgctgttgagctggcgggagtctgatacaggtgaagcagcgtctgatatgttcgtctattgcaggttcctgagcgctggtctcgcgttcattgagaaccacgagcgtttcccgtccgtcgcggaccgagtcaaggtgaactttggcttcatgttctcggccacgggcaaggcgtcctacatcctctggtgcggccatacagtacttggcttcgttcgtgtgtatggtggtacagtacgaggttgtgctgacgtggactgtcgcttcgtggcgaattgttgtcatcttgtagcatcgcgttcctggccgtctcacaaggctggattggctggattctgggcgtgtgcttcttcttcctggcccttttcaacttcttcctcatcaaacgggtacgttggactctgcttggatttttacgtttggatcttccaacgtctaacggcatcctgtatgtttctctgtcgatgcagcaccctgcttacaaggccgctatgctgaagccgactggcgccgctaccatgacggctcagcagcaggaagaggcggaccttgaggccatgcccgagctccgttacaaccagaagcagcctcagatccccgcccccgtggttaccacccaggccgcgaagcctcagccgtcgcacgtgtcggtctaagcgtcgacgatcggccttaggactcggaagtgagagctaagctgcatggctatatatcagctttttctgcatcagctcgttaggcctcggaactcacacagctacgtacatgcaagatgaaaatggaccaaaactcgtacgataacgtgacagctttttgcttcagtttgaagagttctcgttgagctgcttagtacgaagagagagcagcgcatgctggcagtcgaacttttcgccgatccacaatgctgcctgcttccatcgctgcgctttcgttgacttccacgttagcttcggtgtgtactttactccttggcctcgccgccgtgctgcgccacgacgccgttgccgtggtacttgagcgtcttgacccagttgctgcggcggccggtcgggtgcttgaactgcacggccgacttcttgcccttctgcttgatgagagtctcgacgttctccggcaggaagttgtgcgagtacgagatcttgccgtagtagtcgcccacgggggccggctcggcgagctcgagctcccagccctgcttcttggcgaagcgctcagcggcctcctgggtgtcgaacttggtcaccaggccaatgtacgggtcggccgtgctggtccagcccataagcgggttggcccacgtgcgcggggtgttaaaacggatctcccagtgcttggtgttgtggatgccgctctgcatctggttgcgcgccggcttgaagagctgggccttgcggcccaccgaccactcgcccgtgccggacacgacggccgcctcctccgggtagggcatgggcgacttctcgatcgtcgggaagcactcctccgtcgcgtggtgcggcaggactgcagcagcaattacaagaacgcacaacgtcagcgtcgtattatgtcccccactatggcagcattatggagggcagcagaaggcaacgcactggtgcgctcggcctcagtcagccgctgcgcgcggagctgcgtcatgagcttctcctccgcggcggcggccgcggccttggcggcctcgtcgtccttggccacctccgagaaggcgcgggaggacgtggcgacggtggcgcgcttggaggcgacggccgcggcggcgcgcgtggacgcttggagcacacgcacggacatgatggcgctggtgatgtaacctgtggtctggcggtgcgcgattttcagccgcaaaaatggaccaggaggaagtctaaatatcgagattttggtagagatttacacatttagggtgtactacatactacacccccagaatggaatttcagatggctacacaaccaaacccgaagagtgagcgtggggatgatgcagcgccaacaatgaagaccaactgagacgcacgtacaaatatgaaaggtaccgcattaagttatgaggtaaatgtcgagcaaactgatcgcccccactagtaccagtttgccgtggttccatccaggcacgctgcgggccgcaaggcagcgtgctcgacgacagctctcagctttccgccactctcgttacgccccgggagcgaaaatctaacacgcacactccagtctcgccagctccgtcaagaactgctgtacctccgaggtgtcgcggagcgagtacgacgccttcgtcaccggcaactccttcaggttgcctggcaggtccaccttctccgcctcggggtcacgaacgatgatagagataccctggccaagtcctcggccgttcagcgcgttgaaggcatcctcgtcgctaacgtcgtcgcccaggtagaacggcacgacgtcctccgcatccagtcccagctccgacaggatgtacatgacggcgcggcccttgtcccagtcgacctgcatacggtaaacacgctgtcagctctagatgtaaagataacattgttcggagaaaaattgacgtacgcgaggtcgcagctcaaacaccattttgcccattttcttcgtaaggctcgggtggtacgtcacgtagtcgtccacaatctgctcaaccgcattctgcagcgccggatcaacctgcaatacacaacacaagaccaatgcgtcagtaacgagcggtagctacaactccaccgcaactctgcagcactcacgtgacggtagtgaaccgagatggcgagtccgttgtcctcgagctcagcgccagcgatgtgcgcagtctgctctgtcaagtcgcgcagcgcctgctccagctcagggcggtagtggtcggccacctggcagttgatggggcgcgtcttggtgcccttaatgtcgaatccgtggctgccggcgtacacgaggttgtccagctgcacgaagttgtagaccttctccgtggagcggcccgtcacaatggccgtgacgaacttggacgacagctcgctgagcgcagcgcgcatggcgtccgtcatgaaggcgtggtccggcacgtccacgatgggcgacagcgtgccgtcatagtccaggaagaccacggggcgcttgcctgcattgacagcggcgtcaaaaacgtcagaaacccatagacacgccgcgtttcgcgctgcttggggcgcgggcgccaacaatgggagggcaggtcggtttcgcaatagcgtatgctctgctgtagctatttatggccgctgtgctgcttacctgcgactttctgcttgatggagtccatgtcccggaacgcgttggttgggtgcagcatggcggcgcggtctcaggaggcctgtgcagggctggactgcggcggtttcgcggcgccacgtgggacgcggaaggaggacggcgccggcgcggaggcctggaggctgtgctgagctcgcgctcgctgggccgtcggcggcgcgtggagacttggtcgaggctgggcttgtgacggccgccggccacgacttgccctcgagaggcggtgtgcgctggccaatcagcgcgcgtttactcacagtacgctcgcagacgaatatactgaagtttgtatgccatcagtacgcgaggccaggtctgcagcaacctggttttcactggcacggttgttgggcgagtcgcttgcgaatacttttttcttatttcaactgtcttcgggccgctcacggggcagcagtcccacaggcggcggagttccgatgttggcagctcggagcgtttttgtattttcggaacccagcgtgcttgacaatcatgatgctaaaatggcggtgcctgtgaaaccataagtgcgacgctgcgttgtcgtgctaacacgttgtgcgcgaaagctgtcgttgcatatgagcccgtcgccaagctaaagccggtgggtggaagtaagcggcctcagtctttgaggttacgcaggccgttattcgtgctcatgtccgaaaccgagcttgtcgcggcgtgacgagcagcgagtcggcaccggtaccatgctggtcgccggagtgagcgcgtttgctgttctttcggaccgtcgtggtgggtacttcgctggcaagcccagattcctgccgctttgaccgcgatcgacaagcacccagattcaatcccccatgtggttctcgcctgcgttccaagtcccgctcggcgagcggtttaaagcctactacatgtacagtagctagacgacttacgtggggggatgcagtgcatccccccacgtaagtcatcatgcagcgcgggtagcatgtggttctcgctgatttccacgcagttctgccacagcgtgtggggctcggtgctgtgcgagtggagcggtggtgccgcaccacgtcacgcttcctgcagccgttcaagattcaacatcgccgccgtcaaatctcacatcacatcctgtacgccgtacgtaccggtagagtggatttcgaattgcggcgaatctgcctgccggaatggacaagcggtcacacgcgcgaataccgctcgcacattgaagcgcatgtccgacccaatttgcttgcttgttaatacatgtgcactactgtatcgccagctcgaagagcgccttcgttcgccgcagcgcggacgtgcgtgtatacgccaaagcgagcagcagctggattccacatgtagacagcgacgcagcgctgggttttcctgtccaaaactagatgcactcgcagcgccgatgacaaggtgcaaggtatacagtatcctatctcgccaagtccgaccaggattttcgcggcggaggcagcggcgaagaccaacgaattcgattaagcgcttcaacacgcataggcggcggtggacacggcgcggagattcgctctggtcaacaacacctcactcactccgcctcagcaggttgcaggtgcagcctgcacggatggattttatcggctgacgatcgcacgatgtccgttacctttgctcgaatcattccagccaatcagcgcgcggcaaaacgcacatagcccgcgcgctcttgactgctgatcccacttctgcttgtgtcgcatcaagcaaccacttcaaggcggaaccacggagcatactgggcgctagtgtattcggcgtccgcccccattcgagcaagcacgccgcagatctacagtctcaagagcgcagccggaggtagcggcccccacgtcccacaaccaaaccagctcgagcccagaagcatccgccaccccccgcagcaccacaacaagtacaagatgcacaccgcgcaggccctggcctccatccgccgctcgcgcacgtacgacgccgagggcgggcggccgcgcaagtacccgagcgagcacgcgtcgctgctgcacggccacggccacagcggcagcaacggctacgtgagcagcgccagctaccagctcggggcctcctcggggctcagcagcgccgacaacgacgtgaacgaggcgccggcgccgccgcccacggtcaaggaggacgcgcaggccatctaccacatgctcaaggaccagccgctcaacctcatgctgctcgcggcgccgctggccgtctgggcgtcgctcggcggctggagcgacctctgggtcttcgtcttcaacttcatcgtcatgatcccgctggccaacctgctgggcgaggccaccgagtcgctggccttccacacgggcgaaaccatcggcgggctcgtgaacgccacgttcggcaacgccgtggaggtgattgtcgccatcttcgcgctcaaggcgggccagatcaacgtggtgcagagctcgcttatcggctccgtgctgtccaacctgctgctcgtgctgggctgcgccttcatcgccggcggcgtgcgcaacaaggagagctcgttcaacgccgtgggcgccagcgccaactcgtcgctgctcatgctcgcgagcttcgccatgctgctgcccagctacatcttctacttctcggaccacgagtcggaggagaaccgcatggccaacacgctcacgctctcgcgcatcgccgccgccttcctgctcttcatgtacatccagctgctcttcttccagctcaagacgcacgctgacttcttcgaggacgagcaggagaacccggaggaggccgtggcgctgtccaagcgtgccagcgccgccgtgctgctcggcgcgaccctgctggtgtccatgttctccgagttcctcgttggttccatcgacggcttcgccacagagatgcacctgagcaagtcgttcatcggcatcatcctgttgcccgtcgtgggcaacgccgtggagcacgtgacggccgtcaaggtcgcgctgaacaacaagatggagctggccatgggcgtcgcagtgggctcggccacgcaggtctcgctcttcgtggtgcccgtggtcgtgctctctggctggttcatggatcaggccatgtcgctggcgttcccccagttcgagatcctcatctacctcatgtcgatcatcatcgtgtacgccatcatcgcggacggcaagtccaactggctggagggctccatgctgctcaccgcctacgcgctcgtggccatcacgctcgtatgggtacacgtccccaccgctgagtaaggagcgatcgaagctcctcgtttaacttgtccccagtacaatgatagctcgctagtaagcgccaggaacgaactggtgcgaccacctctaaatcacattttgctgaacttcatccgagttctgatgttctaaacgtttactgggaactgctgcggtcatttgatgctgtacttgtacgaacattcaagtcctatgcaatgcgtttcgccagataatggtaatggtggtctacacattgacgaatgcagtggttgaagttgtctatgactcggttgatattagatagataatagtcgggggattcctacgtctctcaatggtctagccagctagcttcgcgtgccatcctatcttatcttgcgtacagagcgtgcgtccgcacattggacggtgtactcagcgctgtgcggctcgtcgacgtggtgctcaagccgctgacgatgctggggcggatcaggtacaccggtccgtcctcgagcggctcactgtcgaacgctcgatgccgcgcggccgagatgcacatgcagcagacgcgcaggcgctcgatgactccgataaggccctcgatgtcttgcgacttggagcacgcggcgcacgtgtcgtggccgcagatgtagcacacgtgcttcttgcgcagcagcgagtccttgactagcttgccgcaaccggagcagctcccgtcgccgacctgctcggaggggtcgacgcagtcctcggagcccagtcgcctccgcagagcgatctcgccgatcttggggatcagcttggccagcttcaacagggcgtaggtggacgtctcgcgcgcggtggcggccttgagcttggccttgacgatgcccttggccttcatctcgtcggggcacatggcatgtgtcccgaagtaaaacaccgacgtctggtgcgacgccggctgctcgcgcagcaggtatccggccagcacactgcctccgacaacgagtcgacccgtgcgatcgcgcgtgagcgtctggaaggtgcgcacggcggtgcgcgttttgtagtcgagctcgacgtagtccaagaactcgatggtcttggtgctggagaccagcgggatggagcccgagaactgcatgcgcttggtgctgaggtgggcggagagctttgtcatgggcacctcgcgcagcgtcaccgcgtacgagaaggcgtcgcccgccagcaccaccatggtggcgttgaagtcgtcgctgttgtggctcgagagcacctcgaggatctcgttggcactgtaaggcagcgccgtggtcgccgatacgtcatacacgccgtgtttggatcggcgctcgaagacgcgcacgccctggccgtccttgcgctccttccagccgccggtcgcgaacgtcgtgcgcgcgtgctcgagcttggcgcgcgcgcgcctcgcgagcgccagcagcgcgtcgtcctcgtccttctgctccacggagctggccgtggagaaggtggtggagcggccactggagctcaagaacgactgcgtatgcggcgacggcgtggtctgcgccgtgaagcggcccgaggagttgaggaagttgctgctgctctcgtccgagcacgtggacgtgatcatgctgcgcgaagagatgcccgagctgctgccgaagtcgcgcgccatggctgtaggtgggggctcgagagttgacgtgtgcgcggcgggcagcggattcgagactggctggtccttctggttggcaaagcccaggagcggggcaacatgcaccccagccgtgttacacacttgaggccgggctctgtctggtgcagatgtgatattcaagcgcagagaacgggggggggctgcaagaaggttcagcggcgtcttgtggcgggcttcaacgcggaagcctgcttcaacgcggaagcctgcactcgagggaccagttaacgatgtgtgcgcggcgcgaaggagatccgtccagcggtctcgacactgtggcaagctgattttcaaaatggtttcgtcgactcgcgcgtggtgtcccaaggtgtccttcctcactcggttgatacatgtaatgtacaggtgttgtgtgtttcccgttcgagtcaagtcgagtgcatcctttgctgaagactgggaaatgagcgcgtagagagctttggaggtggactcggcgtcaaccttgcagtgtgtgcgatcaatggccggccggctcccctacatcaccagccccgagagaatcccgccgagttcgcggcaaaagtggacactcgctgcgactggtgaccggcgtgaacgaatagcatctgctcggtgcagcaaggtccgcccacgcggcatcgcgtgcactcgagccacagcctgtggctcacaggcccagcacatgccgagcagggacgggggaacaggacaactgaaggcttacgtcgcaatagatcggcttcacatcaaccaaattcaagacatcaccacacagtcaacgactgccgcgaaagcgtctgcagcgaaggaaggtggcgccaacttggcgatgccgccgttcatgttgaggaactcttcatgcctattaaaaaatacatgtaaactgcagttggcatccgcgcggattgtttttggattttcgggtgctctgctgtttgtgcggtgagggctggtgcgatttgctcaaggttgcgccatcttctacaacgccttgttgacagcgttgatgtcgatatcttctgaaggaaggatgcgtatcccggtgcttgaaatccgtccctcggggccagtacaggtaccttgtccttgagtggagcaccggcaagcgacatccaaactcagttgaagccgcctgactccttccggtctgaattggcctacgacggcggaagcgagtcgtcgcttgcggccatcgtctgtaggtcgcagtcttggtggtggaaatctgcagcaactggtttcgctaggggccacaagcgagaccagttgctgcagttctctagttaccatttggtagtcgaaagctcatacctgtattatagatgcttcttatcagggttgcagacttcagcacgtgcagggcgtgttgaatatgaatgtatattcatatgctttttatggggcttacatattacgattacgataaatcttggcagtcgacgtagctatcgagcgcaaacgcctcgcgtcgcatacgctctatgcagggcgagcacacggcgatgcgaatcacaaggccaatgcgatattctgcttcgtgggtcgatacgcatgagccgcacacgagtctgccacagactcgacagaaccgctttcttctcaaaaggctggtgagtggatcctcgcaacttgcgcaggctttcacgtccaggctgctctcccctcttaccaccggtgccgacgcggaggtggaagccgacagtgacgtaaaagaccgagtaatactcgatcgcgaccgctccgagtcagggcgagggggatccacgagttgctgcgtgccaaggcgtcggcgcagggcgaggtcgccggctttggttatcaacgagccaagcttctgcaggcgctggaccgcgtggtcgcgaagcttgtccgccgagtgcaaggctaggaaatggagtcgtgtgtgatagacttctgaagtggatgatcttgatcgataggtgtgtctcttcaccactgcccatagcaagtgatcgcaccttcacgccgtagctgtagtcgtgtccaaacagctcgaccatactggcgttccagcggtccgtgttatccggcgacagtacgtgggtgagttcgtgcgcagtgcaaggaagcactccagtcgacatgatcgaaaactctccggtgatgcgagtctcggacaaagctccttcagagttccgcgtcaatcttgagttgctcagtcgtttccggaatcggatcatggcgccaagcgctagctcgcggacaatattgtcctcgtcttggttgctggcttcgacaccctccgcttgcttctcagaggctgtaccctcaggatcgacgtagaacagtcgacaagacgactcaccgtcgtggtagctgccaatgctacgcgccggcaacgcccgacactcttgaggtgagtccgtctgcagctccaccttcatgtgtatctcggatcaaaatacagaatgaactcacctcgctcaacgagcgtccaccgtgcgacgacccattcgtgcccacgcggtgttacgtggcaccaaacgtgactgtagggagcaggaatcgtgctgagatgagagaaggagctggatttggaggccagcgacaacggtttctgactgggacctcgacgagccttcgctgctataggccattgactggataccgagagctgcggagccattgccacgcgcgcggtcatcctctcttacgtgcgcgatgctgtatccctcaaaggactcgaagtagaatggtgcggacttagccgaagaccccccgacaccactggcacttagcggttttcgcgcaaagtactccagcacaccaaacgctctacggacttagccaaagcgcactgacgccgctggcactctgcggttttcgcgcaaagtacttcccgcctaagactttggtcgaccaaataacttagtgaggaaaagaggttaacagagttaggcagcccgccatgccgatccactatcgacttggcttctttcgccgccccattagcgaaaataaatcactttagttttgtcagcctgtacggtcttcgccgccccattagcgaaagtaaatcactttagttttgtcagcctgtatggtgttcctgtagtggccagcgcgcgaatcaaaaccattttcacgtcattgacaatcgacggtatcggtccagagatgacgacgcacgtgcgtggatacccaccccgatgaatctgcagacacacgagcgctggtgcaagggtccatgcctggtctcaaatgtaatgctgactcagccacttcaacttccaggtcttactcaatgagtactaaattactcgatcagtatactagtaagtaatactaaactgtctgacttactcaatgagtaataccctgtccaaaccaattcgccaatcagaattcggatactttcagcacagcaccatgaagcctgcgctgctggcggcgttggccgcgtgcttcctgacgctgctgctggcgatggagcgcggcgcctacgcctggagcaataacgacgaggaggacgaagtggaggaagacgacgacgacgacttcgacttcgtgtccagcaacgtacgcaccgaaaaccgatttgtcaagctaataccttcctgatccacgctaactctcttgtgctctgctgcagctggacttcatcaagcgcgacgacctggtggaggtgcagtgcgacggccaggagtgtgcggccgaggcggaggacggaaacgggggcgtcccctccgtctgggagcgaggcctcgtgacgcccaagcttaagccccagctcatcctgcaggagcacgcgcgcgctgcgaccgacgtgaagaagcagttccgaggcgagacgctgggctacgtgacgccgtggaacaataagggctacgactgggccaagcagttccgctccaagttcacgtacatctcgcccgtgtggctgcagctgcgcgaagactccgaccacgtgccgatcatcacgggcacacacgacatcgacagtcagtgggtgaaggacgtcaagtacggagtggggggacaggaacagcagcaagagggccctgcggtggtgcctcgcgtcgtctacgagcgcaaccgcctcagctcggaagacgtccctgtgataattgagaagatgctggcgttgaccaacgagcacgacttcgatggaatggtgttcgagatcccagtcacggcagggacgttggacatgctgcagcaaatgggtcgggccttccgagcagcagacaagctgctgattcttgtgctgtccagaagcacgaacgaggtaagcgccgagttgttggtgatagtatcgtcgggtggaggttccgttttagctgacgggcgagctgtgctggttgattctgtagggcgagttacctgtgacgcacgagcttttcgctgaattggcaccgttggtgcaccgcttttccatgaatgcgtacgactttagtgctccagggccaaatgcgccgtacccgtggctgaagaagacgctggagaaaatgtctccgatggagcgacagaggattctgctgggactcccattctacggctacgacaatggaggtgagcgcttgttgagctagagaaaagcaaggtgagtgacgtactaacggctgtcatacagatgcgatcacgggaagcacctacatccagtcactgaaagacaacgatgtctccaagattcgatgggattccacggcgcatgtacgtggcagaatgcctggtagtttgtgatacgtgacgcttacttacacgcctgaatgctgtcttctctcaggaatgccaacacgtgtacacagcacaagacacgggcagccaccatgtagtcttcttcccttgtctgcagttcctgcaagaccgattgaagctgtacaaggagcgtggtgtgggcgtagcgatctgggagctaggacaaggactggacttcttctacgatctgctgtagcctacatgcattgcaggacaaacgcgttccattcatagttacccaatactttttgtgcgagcacgttcgtacgagctatggagtcattgaactacttccggatcttcctggttgtgtcttaaggtggcaccggggagctgacattggcatcccctccacctggaactggtgctggagccgttgtttcggcggttgcggtgcctggtccagttcccaccttgcgactttcatcaacaaaatccttaagcaccttgcgtacgtcagccagcgagtccaccgcgaacgaccaggcatggcgacctccgctatgttggacgtctgggcccacgacgacagcaaagatcgagacgtcttctgccagtcgcacaggcaccttctgcaagcggctaaacgccaccttgttgtcatcatccacgtaatcacccgcgattaactcttcgtcatcgtcggtggaatagtcttcgtgtcctcgcaccgctgctgctgccgccccgatcaactgttcattctgaagacgcttcttcctgatcttgatagttggctccagctcatcagtgacaccacttccgcctctcggacgcggcatgcggggctttgccttcgaaacgtgagcagcagatggcactggctgcgcgtgcagctgcggaggtacaggcttgcccaaggcgatagagttccggcgaatgcgctcgttagctgcttgttcttcctccttcctctttctctcatcgtgacgctcgttcgactcggtcaccaacgcgttcaacgtctggaacatttgatcgtctgtcacgtcgtcgcacacgcacaagacaaaatcgacttccaggtcgcttttcttggatatctgttcagggagagacaaatgcttgagaatgccctcgagtacacgagttttcgtgcacccttcgtgctccacgctgacagacatgtgcccttgatacacttccagtgccgtaccgatgagctgccgctcaaggatgatctgcaagtccttcgcctgccaacttccaaaatgtggatcagcatctccatagtgccacgtcagcgagctttccttgtcttcaatgtaacttccaggggttcggtccgtaaacatgagcattgtgggtagcactaagtccttccacgacatgtcatcgccaccgaacgagtcgtcagtaggagcaatgctcccaccagtgaccggcgtattctctccagtgtctgtcgagtctggcgcggaagtgtgatgcggatacgtcggtagactgcccatactcatgtgcatcatgctgtgggcatcgctcgagtaagaggcatccagactggcaccgctgacacttcccactccagccatagttgcggctgtacttcctcccgaccgagctgttgccacgtcgtactggaatttgctcatggtcttccactgctcccgtgtgttactcaaattcatgcgatagaagaacccgtcctcggcggcgacaccaacgcgcacaccattcagccacgtctcgaggaatttgcgttcacggccgctgacaataaatactgtgttgcgctcgtcggcgctgagcgcatcgagaagcgacttgaaattgggccccacagccgcaagtgggaggagcgagtgctgcggtgtcagggtccggtcgtagtcgagaatgataacgcgattctgtgcactgcggtacgcttgaacgatggctttcttgtcaagcttcggcaactgcgttgatgtcttgcggtttttctctacagcctcaccaagctcttccaaaaactcttcgccccaggttgatgccgtgttggacgacacatatcgatacagtttctgctggcggatttcgcgctcggtgcggcacatactcaaagcttgatgaatactcagagccacgtcttccgtgttccacgggttaataacgatagcgccactcaacgactgggaacagccagcaaactcgctcacaaccaatacgcccggtccgccgtcttctccttcccattctgtcaaaaccgaagccgaagactgtcggggagatgaaatcggtgacaacactccacttctcgtcgagctttctcccgtcgtgatttccacgttgtcggggccctttgcagctccaaacgtaggggcaggaactggcgtgctatcgcgcttgatactactgccgctaaatcccctggcggccgcgcgggcagccttcttccgttcatccttgttgcgcatgaaatgctgctggcagacaataaactcgtgcgacaccaggttcattccatcgcgagtcgacgtcaccagacacacatctgccaaatcgtatagcgcgcacagctcctcatggggcgtcacttgttgctgaataaagtgaatcggcgcgtagtccagagttccgaaaatcccgttgatacgcccgacgatctggttaacttgagttacgatattgtgatagctgtgcgagctcatttcgagttggtggcacgcgtcgtatccagcatttcctttgccggttgcaataggactggcagcagtaggcggtgactctgacagccccttgataggactgtcactgccagtggagcttcctggtccaacaatcggatacgacgaagatcggggtaggatgttggcgttgtctccactcgtactgctggcactcgacctgcggccgttatcacctgcactgcttgccccggtggacttgctgtcgaccacgcctgagcgtgacgatattccaatctgtactagcacgacgttatgctgccactctggaaaccggtccagcaacatttccatcgctagcatcttgtgtgggattcctttgatattgtcgagtcggtcgatccccagaatgatacgcttgccaccgaatttatcgtgtagttcatttacccggttcagggttggcatactggacgctgcgcgggcgaaaggctccaagctgattccaatgggaaacacgccaatcgacgtgaagtggtctcggtctgcaaaggagctacggacacccttgtgcgagcactccactccaagcagtcgatgacaggttgacagaaagtggcgttcgtagtcgaaggtctggaagccgacaaggtccgcctgcaggacgcccgttagcagctgtgatcgcaccggtagacgacaatatacgtccgaagctgggaacggcgtgtgcaggaaccaaccaattcgacacggcgggatgcgctggcgcagcagggatggcagcagcatgagatggtagtcgtgcacccacacggagtctccttcattgtaaatctcagcgatagcatcagcgaagctctcgttggcggactcgtaggctctccagtcttgcttgttgaatctcttggtcgagtggaagctcgagttgcctccggcattgaacgtgaacggcacgggctccgatacatagtggaacagcgaccacagcacttcggacgagaagcccgtgtgtctggacgccacctccgacgacaaaaagaccggcaggcagttgtgctgcagcagcaagcgccgcaccgcctcgtgctcgctcttggggatgtgctggcccacccagcccacccacaggaagttcatctcggccctcacgcccgtcagacacatgagtttgtccaggccgcccgtggtcttggtggccttccagcgcccggtctgcggctgccgctccagcagcaccggcaggttgttggacacgacgatgagctggttgctgccgcccgcgcccgtcgccttgtccgccgagtcgtcgtcgctgtcctcctcctcctcggcgcgcagctgcatgagctgcagctgcagctcctggatgttggccaggatctcctgctcctccagcgacagcgtgtccaggcggctcagctcgaagtcggtggcggcgcgctgcgacacgaagaactcgttgcgcggcgacaggacgccgctggcgggcggcgacgcggccgccacgtgaagcgcagcggtgtcttcccccatcgagacgtcaagtgcggcagactcaagagtgcggagacttccgcagccgcgattcgttatggctacatgtgtaatttacaggagctgacagatattgaccacgcacatttgatttacaagtttaagctgaccaatgagagtgggcgccgttggtcttcaacgtctgagacgtggcgcgaaaagtgtctctatctagggaagcaggcggcctgactgtagattcgcgagcgagacttcgttttcacgccgcgacttgtaccaggatatgaacgggaacgacatgaggtacagcaccaacgcgccgtagaaagtcgccaccacagccacgactgtccagcccttggacgacaggtcgaagctctgctgcagcgtccggaagaccagggcgtagttgaccccgaagagcgcgagcgtaccgacgactagtgcgagaacgacccaacgactgtagacgaacggctgccccatgagccgcttgttggtcgtgaacgtgagcagaggcaccagcgcgaacgggagctgcacgctctgcatgacgttgatcatctcgctcacgatgtcgctgtggaagccgtcatactcggtcagcagcgcgacaaccaatgcgggaccgagcgccatcgtgcgcgtgattgccactctcttccaggcgacgatgcggagatccaggaagccttccatcacgaactggccggcgtacgtccccgtcatggttgatgcttgaccggaagcgactaatccaaccgcccagatgatcttggcagtggccgagcgagctgctcacggccgcccctgcttctttcagtccaacctgctgacagtatccggcgacgtgctttgttgtgtagcactgcgtgcaagacgctgccactgctccgctctcattggcgcaggtcagcccagttgttgcactatagatggagtttcctgagactaacgcagccgcagacgggatgcacgcagtttgaatgcccgcatcgtagacatcggtggtgacatcggcacccaacgcgtcacactgctggctgtagaaggtgctggcgaacgctgagatcacaaacatgttgataaggaagctcacgaacagcgccaagaccgcctccagtccgaagtagaagttggcctctttgacggggccagcacccaccccacgacgagagcggacgctgcgagactgcaccagtgcagagtgcaggtacacgttgtgtggcatgatgatggagccgagcatgccgacggcttgcatcacgttctggttgtcgatgcgcgggatcgcgatgcccttagcgatctcgatgccgctcggtttactcactgtgaagtcgacgaagaagcacgcgcacatgatgccgatgaggcccatgaagaaggtctcgaggaggcggttgctcttgttgtcgccgcgtcggtcgatcgcgaggaaggtgaacgtgtccaaggcagtgaccaggcagccaatccacagcggtagaccaaacagaatttgcagagcgatggcggtgcccagcacctcttggatgtcgcagccgatgatcaccagccccatcatgatccacacggcgtaggtcacgacgcgcgggtactcggctcgacagagctcggccagatgacgccccgtgcaggagccgagtctggccgctagtacttgatacagcccgcccagcaccgtgctccagaacgtgcgcgagtaggcgccgctctgcaggtccgcctcgaggttgcccggatccaggtaggccatgctcatgagccagccgggccccacgaaggaccagaacttgccccaggagaacggcggccgctccggcgtcatgtgcgtgtctccgtgcagatccgagagctgcgagtacgaagcgctcagcgttgcgccgctggggcgcaggatctcctccgctgtggccggcatcttgccaattgcaacgtcgttgcacgattacctgggtgagacggtaccgtgatgaacccctgtgcaaacgaatattttatattgaccaatcacagcgcttatttaacactgtctcattttgaccaatggcaggtcatcaatagctgcaaaggttgaccacgatggaagaccaagctgcacctcctgctagtggcgacggcggcagcgcaagcagcaacgcagtcgaggccgcagcgtcttcacagtcttcttcagcacctgcatcatctgatgtgagcgtcccaagcatcttagactcgcggacgctccctccagtagctggaagcgccgacgacgcggctcctcgctacctgccgcgtgaggacggatccgcgccgtcctctttgacgttcagtgaggccttcgctcagctgaggaaaacgtcttcgtacgccgctccacctccagagaagccgcagggggacaaacctcctgtgagagacgcagcggctaccgtctatgtgaatcggagacagaagggcaacccgatgctcaagtccgtgcgcaacgtggggctcgagttccgcgacggactgatcccggactacgtcatgggtgagaatggatcgtgctgtgtgttgttcttgagtgtgcggtaccacctgctgcacaatacgtacctggacgagcgagtgcagaacgtgcggaaggacgaccccacgcgctacaagaccaaacttgtcttgtgcttcgtggacgtggatgacaatgaagtggcactgcgcgagatcaaccgcgttgctctgttgagcgatttcactcttgtactcgcgtggagctggctggaggctgcgcggtatctggagacattcaaagcctatgagaacaagtcggcgactattatcaaggagaaagtcgaggccgagttcttgcccaaggccaacgacgtgctcacgtcgatccggtcggtgaacaagactgacgtggtgacgctgctgtctacgtttgggacggtgaaggggctgatgaacgcctccatggaggaattgtcgctctgcccaggtgtgggcgccaagaaggttcggcaactactcgagactttccaggagccgttcaccaagcagtgaacgtggcggtcgcggtggagtggagtgacgacaatttgttgcgttgttgaggtgctgtcaacaattacggcgacaacatcttcgagttgcatcccgcatggaccgaatatttttcaagacgtacgatatcgagatcaaaattgtgtgcaaggattcctccttgccttacttctgccagccgatggccagcagtacttggcgtaaattacttcgcaggccagcctttgccgtcatcctttgtcaggattccttacctgtccagaccctatgcaggatgtcctcaaacgtccttgcggcattcactacagccaatgtgttcaaacaaaacattcaaccgaaccgtgagaattgtgccgttttcttatgagcagcgaggttgtagggggaatactaatgcataatgtccttacgcgcgaggggaggcgctgttgcgtccggtctggttgctcacctcggccgtgaagccgacagcttcgatagcggccaccaggtcgctgtacggcgccgagccggagatgtacgcggcccgctcgtcaaactccaccactacatcggtcacgccaggcgtgttcttgagcgcgttctccaccgtcgtcccgcagttcttcatgcacgacatgccctggacttggatccgaacggtggacgggtcggtgaagcgccacgatccgcgctcctccgtgatgtcctggtcgaggttcttgaagagcaggaaaccggcaccaaagccgcagatcagcgccacaaacagaccggtctcatacgtcatgactacaagcatggcaaagtacgcaatggtcatctgaatcatgtacagaacagcgagcgtcagcttgcactgcatcttgtggatcttgtcttgcggccggagcttgcgtgccaccagcagccgctggcgcaccacctcacgccccttgaccagcgattcatttagcagcgcgatgaggaagcacccgatgaagccgaacgcgtacttgaggccgctgttgagcacccagggctggaagagcagcatgacgcacgagccgtggatggacgactggaagccgttgaacatgacagacccctgtcccgtgcagaagcccgagctggtcgaggacgagtccgactcggtggcagtgctgctcgacgacgttgaaggggtgtcgctggcactcgcggaggagtagtcagccacgaagctctgggccgcggggctgagcgtcgtgatgttggtggcgtcggagcacgtggcccccgagcagatgacgctgtccaccaagtagcgcggctccgagttgacgctggccaggtacgtgttcttgttgtcctgcgacgcgaagtagatcttctggccgttgttcagacacacgtagacgaagttgtcggtggtgacggcgtcccccgacacggggtcgctgaggccgtccgcgcactcggtgcacgtgctctcgcacttggcgaacgtgctggcgtccgtctggttgacgatgaactcggccatgttggcggccaggtacgccgtgtccgtcacgtcgaagtcgtacgcgtcgaaggcgcgcgccgccatgccgcaggagaagatcgtctggccgtgctgcaaggtcacgtagttctcgttgttgtagccgctgccaagcgtgctcatcccgcacacggggcacgtgtagtcggtggtgctcgcgcccgacgccgccaggtcgcggtgcgcctgcatcgcgtgcatgtcgtgcagctggtgcagctcgtggtggtggttgtggtgcaggtgcgcgctggccgtcgatgccgtcgccgccgccagcagcagcgcggcggcggcggaaagacgcgctcgcaggggcatcccggctggaaggtggcgagatgaagactgagctgagcctgcgggcaatctgtagtctgtactgcgtaaatttgatgattgcagagacgggcggcaagtgttccatacaaattcctagatatccggactagaagccgcgaatttgaagcccatccaaaatgactccgtgaaatctgagcgcggaatgcggcgatggatgcatgtcggaagccccatacacccgctgtaataccagcaaccgaaggtgctggcggccatagtgaagagcatgagcaccatgaagcagagtgaactcgttggtgagcaagagtccaccacatcaacaggacgcattcgataattgcatgagagagggcggcgttccgtgttgcaccgacgcagctgatggcggctcacgcttcctgcagtgcaaggcccgccgttcatttccgtcgctgccatcgagctgcagcgtataggatagtattcgctaggaagcagagtagctagctgccagcgcttccatcgaacaccaccgcacttgatcctctgcgctcagcccggcatctggttcgggcgtggctaaatcccggctctggacgcatatttcgggtcccagcctcatttttaccatttctctcaccatgggagctcagtcgctgctggtgctggtgctgacggcgctgctgctgctgggcgcggacgccggccaaaacctgcgcaagacgacgtgcccgctgtgcaacatggacgtcaaggccaacatcaacgccaccatcctcggcgaccagtacgtctacgcgtgcgagatggccggccacatcgactcgctgcagaacgacccggtgcgtgcctgcatgaataatatctatctatccctccatggtgccattatctgacgttgtgttgggtgtttcgacggacaggcggccaacctgggctcccccgaggaggccgacatcaccacggacgagatctaccaggacgcgaccgacatcaagtgccccgtgtgcggcaagggctacgaccagctcacgcacgccgtgccgtggatctccaagggcgcacagaagatctacacatgctcggaggagcacgcgcagctcgtgttcgacaatccgaccaagtacgtggcggcgcagacctcgtccgacgacttctgctacgccggcgcggccgacagccccacgggctccgtcatgttcaacggcttccagctggccatcggcggcgacgccacgtgcctgctgctgctcttccagccctgggtgctgtcgtccggggtcaagtacgccttcggcttcctgggcgtggtgctgctggccatgtcgcttgagggcttcggcgagctgcgcgagctcgtggagaagcggctgtaccgcgaccacggaatcgtgtccagccaggctgactatatgtcgctggccaccccgcaggtcagcagcgcgagcgatggccatggctctagcgactcgtttgtgcccaagaccggccgcgtgccggccgcccccaagctcacgctggtccggcggctgccgttctggtgcaagctggtgctggcggccatgtacatggtgcacctgtgcctcggctactgggtcatgctggtgatcatgacgtacgagacactcatgttcgtggccgtcatcgtcggcgtcggcctgggcttcgccatcttcaaggacacggacgccgacgagctcaagggcagcgtggacccgtgctgctcgacctaaaacccctgcaccggaataaagtatcttgatttcactatgctttctggttatggcgccgtcatttcgctacactgccggtagcaaagatgccgacattccgatttttgccagtcaaaccccattagatccgccgacatgtacggcaccgtgagctcgagcaccagcgccagcagctcgcgcgacgacctggcgccgccgccgcccacgccgtcgcccttccgctacaacgtgcaggagggcgacacgctggccggcatcgcgctcaagacgcagacgacggaggcggtgctgctggcgctcaacccgctgctgggccgcaagaagcggcacgtcaagctctacccgggccagcagctcatcgtggaggaggcgcgcgccgtgtcgctgccgccgccgcccgagtgcatcgacaacggctggggacagatgcacctcgtgcgcgcgggcgagacgctgcgcggcatcgcggcgctctacaacacgacggaggagatcctgcgccaggacaaccgccgctacttccccacgggcgagcgcagcctgctgtgccccggccagctgctgcacgtgcgcctcatgaacacgggcgagatggagcgggacgaccccgcgctcggcgcggacgcagacgccaaggcctcggcgctcaacgcgcagcgcgatgcggaggccacgtacacgggcacgtcggccgcctttgcgcggtacaagacgcacctggtcgcgccctcggacaccttcgagtccatctgcaaggcgtacagcatcccgtactcgcacttcctgcagatcaaccgcggccgctaccccgtgggccagcgcgccgagctcgtgccaggcgaacgggtaatcgtgcccgacctcctggcggcgcagcaggcggccagtcgacgcaacatcgccgaggtgaagctcaccaagcagatccacgtggtcaagcccggcgacacccccgaggagctcgcgcggcgctacggcatgacgtacgacgaaatgcgcgagtacaaccgcgcctacttcccgaagggataccgcggcgagatccgcccaggctacaagttggtggtcaagcggccagtggatacggacaactccgactcccctcggcagtcgctgccggagcacagcggataccgagacctcgacgcagtgtccagtgcgtgatcggcatcgctactgtcgtttgtatatgtagaaggagaagcgaatatgaagctgtatcaacgcgtgcttgctttacctcatagaggatggggcccactaaggcgtcctgttcgacgcgttcgtctttcttgtcttcttttgtacgtgctcttcggctactcttcttgtctaggtggtggtgtgttctacgagcggcgttcgcgtcgtagtcgacgtcgagcgcgctcagatgtatcgggtgtcccctctggggagccacccggcggcgtgctgaccgatgctgaagctttgctactcggtggcggcgtgctgacagacgctgtggatcggttgccatcaccgtctgggggcgagtctgcaaacggaatggcagtgtcgccatcatcactcgacgcggacgctgcaaccgcgaccgatgtttccgtcagcgacgtggcagaatggtccttcgcgtggatcgtcgccgcctgaaagcgcttcacgacaacagtcttcgacgtcgaatccgacgcagcgactccgccgtcctcgggggcctccttcttctcttcttccacctcttgatggccctcattgacgctagacgtgagctcgaccacttccacgcttgacttcataatggtaatatctgcctcttcttcatcgtctgagctgtcgtcgggcaacaagaccacttcttcagcgtcagagtcagcgagtcgttgccaccgtctacgccggcgtgacgcacgagcaaacagaccacgcttgcggcgacgagctaataaatatgctgccaatactgcgagcgccaagaacgctactgacagtaaactgatctgtgccaacgtaggcccgggcagctcgaccgctgggatttcgacgctactttgcttgtcagcgtccacatcggcagtcttcgtgacatcaactgccgcagtacttgagtcttcacgcgctaaatcatcagtggaggccaaaccttcagcagcagactgctcactttgcagccacacctcttcctcctctgcaatagcacgcaactcctcttcgacgcgaacgcgctcgccttcctcctgcagtataacttgctccagctgctccagctcttcaatttccttcgccacgacaacgcgctccgttgccaagctttctactttgcccaccgtagcagcaactgcttcgatggcctccacttcttgccgctgcgcgttcgtatcctccagctgtgtctcaatgccatttgtaagctcacttgcagattctgcgatagtgcgttctacctgcgcggcaactaagtccgcttcttcagcagccgtctttagctcttgcgcgacttcagagacctctagctcaatagttacatccacaccattgttgtctgccatcaattctttttcaacctccgtgccaacttgcttcaagtcactcgagtatgtgtcctcggtgtgcttttcctcgggtacattggctcttggcaggacaccaattcgcgtcctgatgtcaggctgaagccgattcacctccaatcgctcggtgctttcacccgcggcactctctaactcgaccacaagctccgccatagcaccgtcaatcgggacagtcacgtgcgcttcgatctgcagctcgtcttgctgggaagagaccgcttcagatacgttttctgcctcaacaaagtcgatcgtgttcacttgcgtctgcttcacgtccagaacaatgtcctccacctccaccaccacttcagcgatagcagcatgcttcaattttccatgggttatctccccttgctccgtcaactcgacttcaactgctgcaacgttgtcctcaataagctcagcaacaacctggacgtcgtgatcaccatccgtcaccctctcggatatgctggcgccttccaccacttgggtttcagtgcgttgtaccgacagcaggtctggttcgactagctcagcggaaatctgcacctgctcctcgctggtggaaacgctatccaaaacatccacagtgggcacgtactcggctgtttctttatcctcgtccgtcacttgatccttctcaatcggttgagggaccaccggcgtctcttcttcggcgacttgttcactatcggctgtgtcagcatccgagctgccgtcttcaaacaccgtggatgctggaatctcagcaggaagctcttttcccacgagttcggcatctttgaagtactgctcctcactatcatcttcactcggtaactgatcatccacgggagctttcgctgcatccgtcggctcttcgtccgtagccaacgcgcgctccaataattcccgtttcaacctaagcgccgcttccacctgcgcctgaatatccgctgcgatctcggccagcgcatcaacaccgttccattcgtcagcttcacgtgacgcgtgctcgtagtcctcaatctcttgctcaatcgacttggcgcattgttctgctagttcccttactcgattgtcaataaactcgacagcagccatcttcacgtcgagaacactttccagtgctattgctcgggtgtctgcaatgatcgagttggcggcagatatgatagcaacgcgtcgtttctcgaggcgctgtacgtcctgtaatgcccgagactcgtgcacttttagcccacttgcgatgttctgaattgcgatctggtgcatctgcagagtttcagacaattcctcgctaggcagactcacatcactcacactcgggcccaatcctatccactcaaaaacgtcgctcaaacttgacctcgccacctctgcaccttgtttcagtgctgttcgaacacgctcgacttgctcgtctctcgcgcccgagtccgagttcatcaactcaaacgcagacttcaagtgtgtttgcacccatctcgtcagcatttccagggcatccgccaagcgcaatgcagctcgctgtagctgaacacgtgcatactgaagcagcgtggtcaaaagcgaggccgttagcctcaaagcttgggagcctcgcacgctccccaggttctcgctcacgagtatctgagcagcacgtgccgccttctccaacctcgcactatccagcagcgccagccactcggctcgtactccttcactcaatcccttcgcgtacggacccatttcgttctggagcgcaacgagcaggggatagagcaccttcttcgctctttccgccgccaattcaatcgtaatcgctgcaggcgacgacgggtacatccgacaaaccgcgattcctcccgccaccgagactgtcaccactccagcaaccacagccagcgcgaccgcggatctactgcacggagcctttcgcttcttcgccatcgatgtcaccttcacagctgctttctcgtcttgcgcagtatttccgaaactaccaccattcaccgctgcgatccccctcccagattccgcagcgtcctcaaccaggtcaattgttttctgtgacggcttctcaactgccggatcctcctcctcaacggcggtggcctgatgtccgttctcgcgcggctccagctcctcttgctgcggcttcggcccattgagtcgctccattgcagcgtccgcgctgctgctgcgtctgcggtccgtccgtcggctgccgttggcctttggactctggagtccgttggtcacggcgtctgccatcagctgctcactgcgtctgcgccgcaggaattgctccgtgtacgtggcggtcgtgctcttggctgtgggcgtcttgcgctccggcgacgcgagtgacgcctgcgagctgctgcgtctgcactgctcggccctggcgggactcgctcgcgcggcttggcgctgctgctgccaggccaagagctgctctttccgctcgtctcgggcgggcgacgggggcggcatggcggccgagagagacggcgacgtgcctcgtcccggatcgggagctgctactggagacttttgccccttgtgtaataacaattaattgatttcaatttatgatccgatactgaattcaaaacggcaattaattacttcaacttcctacctagcaacattccattgcacttgatgcgggctaatgtaagttacgagtttgtactacgagtggcaaccttggtcgttggctacgccatacgtgtgcccttgtcgttcatcgatttattgcgcggcgtccgatgcgagtgcaagcaccggcggatcggcggaagtcaattgctccttaacgcactatccaacgggcactcgactaacaaattcgatcgcacgcagcgaactgctgcagcctgcatcgaccacgttgttgaatcgcagtgtactggtggctgttggatacatgtaagtgtagcgctacgccgccgagtcttgcggcaccggcagattacacacaccgtgaggcgctggtggcctccgatcgaggctcaaccatcagcacgtcgatcacggcaactccatgtaagcggcgagctgcaggtcaggcaggccacattgctgtcccggcgggcaggcgcaaatgtgacaacgcggcgccgcatgcattgatgggtggccacacagcgctccatacaaaccaggtttgctcaaccgaggaagcatgcggtatcatggcaaccgtctgcagcgcttcgtgacctatgtgaccacggccgaaagcctcttgtagagaggtctgcggtggtcggtcattgcacttttgtatgtgcgagaggcggacggtccctacatagagggaggcgcttccgcttcaacttacggttcaagagcaccgaaaggattcgttgaatctgctggagtcactctcagctcctgcacgtttgaggtggatacatacacagcgctttgcactacgtgcgcgactacacgctgaacagccctagatcggatcgtttggcacagcggtgtgaatcgcgatcgctgctgcagcgtgattgtaggtttgatttctcgcgttgaacggtgtgctgtgatcggtgtgcagtgcgcgtttgatagttttaggcgcgtccgtatgtactctgccttgtccggctgctattcatccaggcgcagtcgtaaagcttacctactaagtacactctagatagccgtaattttgaaataaatccatgacaccctgaaagacgctcgatgccgccaactttgcctgctggaagcgtgtcagcggcttcgcatatgactcctctaaaatgaaacgctaaacaaattactactactagtagtagttgtttaacggaccgcagaccaaattagtttctagttcaaaattactggccccaaccggatctccccctacgtaaatataatatatttacatataatgcattgtattatattgcagtcactgcagtagatcgtgcgcggaaaagtttagtttgaggtcaacttagaacaagttcgctaagggatcctttaacaaagcaaatgcgttaaccccagtgttttattgaacaatacacgggcgtgctattgctatttgagagagtaaattaccgatccatctgtttatataaactcagagcggcctactcattggttttttggctgactagggctacgcgaagaatgggataggattgcttactgttaactaacttttcaccgcatcctaattaggaccgccgctatttagaaccacttattcagctgatgttactacgacatcttctagcattccactaacgacgacgatatattgcatactgcagcggaccttcgacttaaacacgtaggtgatcgctggccgactcctgatgcggcccgctagtgatgttagtaagacctgcaccaacatatcatcaaaccatgctgttttgtcagcgcttgcatttaccgatatatttacgcaatccgcatgctcctctcctgcgcgcagaatctacccgacaatgtaccaccactatgagcacgatgtacaatcgattttagagcaaaatcaattaaacgaattttgacttgacgaatttgcaaatgaactggaccagtctccatcattcttgaaaagtcgagaacactcggtcaatcgactccacttactgtaaattgacctaagacatgttaacggttcatcactggtttcgactggacggaggaacagcgcccgaattaatcctatcagcacttcgtcgcttcctatcccagtataaattacaagcacgtgcacattttcgactcgagaacagcacgcgcgggcatttcgacaagattggagtgttgtatgctttgtgactttgcgctcatccgtctcgttgccgtagaatggtggcaagaacaacgtcgtcattttgcgatagctccaacaggggggcggaaccagacccaaatcgtaggggggtgggtgggtcaaaaataaggggggtacaacgcgtaaggtggaggctcgaaaatagcgctccagagggctgaaaaaagggggtcaagtgaggggtctgaaattttttagggggggtgccccccctatagggcctggttccgcccctggatagacggttataaaacacctaattgaacgtgttttttttaagttaaaacggaccccccccccaaaacaccccaaaacagttttcccaaacatgctcttgtaaggttactgccagttaatccgagctgctcttaagtccgccgaaaggacacaaagaaacacgctgtcctgtctctagcccttagagacaggactctaattcgccgattcgcgtcaccagcattaccctgagctttcaagctcggggtttcaagccgggcttagggccgagctcggttgaacccgccgacgacgaaacacagccacgcaaccttgcctgcaggcagcgcgcaatgccggcgctcagtgagaattctgcggtgcgcagcgcaggtcgagcgatctacctcagagcgcgcgcctagaagcgaagagcgaagcaggctagcagcagccctccagcgccatggcggacattgacacgcactcgtcgtcgtcctcggacggcggcggcgacgtgttcctctcgccgcgctcgtccggggccagcaagcgcagcgtgcagtccgtgcccaccgtgcgcgaggaccagcagcagccggagacggagccgcacgaccacgacgtgcggcgcagcaccgtgagccgccgcgagacgtggatcggcgagggcctgatcgacgccagcggcctcgaggccatcgaccgcctcagcgacggtgactacgccgagatcgtcaaggagtcgcaggccgtgcaccgcggcgcggacgcggacgacgccaaggccgccaagctcaacgagttcctgaaccagacgtacccggcggagggcgacgcccccaagcagtcgacgcagagacgccgcaagctgctcgacttcctcgccaacgacgtgggcgagcgctacctcaacggcgtctacaaggaggaggagcgcgaggccggagaggacgaggccggactggacgacctcgtcgacagcgacgacgagcccaagttccagcacgccgaggacctgcacacgctaagcagccgctcggcgcgcgctaatagccgcctgcaggccttcctggcccacgagaagaaggacaagcgccacagtggcgacgcgagccagtccttctcgtccgcgcactcggcgccggcgtcctccgagccgcgcaacaagttcgtgaccaaggtggtgtcccagaagtcgcgcatgatgctgttcaaccccgaggacgtcgactcgcagcagctgagccggatcgtggccgaggaggccgagcgcaagcagaaggcgcgcgccgacaaggagctcgcgcgccagaaggtgcgccagttcctgctcgaggaggagcgcgaggctgccaagcgcaaaggctcggacaacgaggcgactatcaaatctgtagacgaatccactgttcgtcgggagacggtgatcgacgactacggcaaggtcaatctgctcgactacttggaccgggtggtggacgacggacaccgcagtcgcaacggcggcagcgtgccgtcggaggtggacgactccggtcctccgagcgagtgctcgtcgcctcgatcgatcgcctcgtcgcttgaggcggacaccagcacgtccttcacgcagggcaacgatgagtcggtgtctccgccgacttcgaacacactgggcaaccgattcgcgcagttcctgcaccgcggtggttcgttgatgggatcggaggagagcagcacgccgcgtgtgcgtcgcattatccctccttcgccgttccagtccaaggcgtccagcgacaagatgacgctggaggcagcgttccacgcgtccaagccgccggagcctcctgccgccccggccatctatggcgcaacttccgcgcgcatgacgccgctgctcgctacgctggaccagatctcgcatacgtgccagaagaacgaattgtccgaggtatcgatcgcgcgcatctcgacgctgctgacgtctatcaaccagatcgtgcgcgacgacatccagaagcaccgcggccagccgaaccgtgccgttcgtcgaatgtccggtgcgcaatgggccaagagcgagcacgactcgcacgagcacgagaagccgcgtcgggctccggctcctgtgcctcccaagccggtcgctgagatcccgcgtgagcctgcgccgatcgtgtccgcttctgccacggttgacaacgccaagttgaagactggacccggcgttctgaatgccttcaagtcgttcgacgcggcccagaacttgattgaaacgctttcgagcttcaacaagctgctgacggagtgcggcctgagcggcgtcaaggtggacgagccgtggcgcgtgtacaaccacatcaaggcggccgtgtacagcaagctgggcttccgtcacaagcagctcttcaagctgttggacgcgcgcttcaacatggacgtgtacaaacgcaaacccgctgccaagaagcgtgtgtgcatcatcggcgccggtcctgtgggtctgcgcgccgctgtggagacggcgctgctcggcggccaagtggtggtgctggagaagcgcaagcacttcagtcgtgagaacattctgcacctgtggccgtgggtggtgcaggacctaacggcgctcggtgcgaaggtcttcttcccctcgttctgccactcaaccgcgtatttccacgtcggcactcgtcagctgcagctcattctgctgaaggtggctctgcttgtcggtgtcacagtgtactcgtcgacggcgttcgagtcggtgatctcccccaactcggaagagagcgacaacaagccgttctacaccgtggcgacgcagccgcagatcccgtggatggagtttaccgcagtgctcggcgcgtcgggtaccaacgacaagctggctgagcccgcgggcatcaaccggttcgtcttcagtcgcaaggaggcgcttggtatcgtgtgctacttcccgaacctgggcacgaccgaggagaagaaggtgacggagttctcgtggaccatccagttcaagcagcaaatgtttgccaagatgcgcgagatcggcgtcgacctggagaacattgtttattaccgcggcgagatgcactacctggtgatgaccccgaagcgacagaacctgctggagcaaaaggtgctcaaggtgaaccacccggagcctcaagacctggttcaagacgacaacatcaacaagggtacgctgcacgactacgtcaagcgcgtcgtgtcgttcctagggatccccaagaaggccgagttttcgcgtatccgtatgttcgacttcagcacgcgcactcgcgccgacaaggccgcgagtatcatcacgtcacagggcaagaagctctacgtcggactcatcggcgactcattgattgagccgttctggcccgagggcgtcggaacctgccgtggcttcctcggagcgctggacggcgtctggatggtggcccagatcggcaagaaggcggacgagcaactgctggccgaccgcgaaatggcctaccgagtcatccagcatgtgtccggcttccggcgcgacgacttgcagaagaacgtgcgcaagtacacggtcgaccccaagtcgcgctacacggtcaagttcccgcagttgtgttaaaattgtgaatataagcccccttcattttgtttctttacttctttgtagtacatgcatactagtagttgttttgtgtccaagacgacctactcacgcgaggtatctgccagtggcagactgccacctacagcacagtgctgtcagcactacgtggtacacctaccgaaacagctaaggcaacgactgtccaacttactgatacagaacctctacctgaacggagttgaggtaaaggtttggttggagaattcatgtacttctgagtactattcgcgtctcgagtggagtgagacgggctgtaacccagggatatgtgtggataggtagattcttcaggagctcaatgcagctgcaacttgcttgcgtcgcaattacgcaaggacactggcagtcacgcaatgaagcatacggaagttgatgcgtagttttacgctgggataagagtcgagaatacacttgcatcttaccccatagagccttcagcggctgcttactgaactgggcaggggtgtgctgtgctatttttctggcaccgattacaagtatcatacggcgactgcaatcgtatttggtatgggtaagctaggacgatgttgcgtttgcggggagagtgggtgggtcaatacatccggccatgaggttgaagacgagatgtgatggtgctgctgtcttgattggcaagagagactcagggtcagttcagtttccgctgcaagtccctcaatccgatttcgtgctgttgtccaagtttttggtgaaaacttcaggacaatggcgactctcgaccaattcaacgggcatccagctccagcttcatccagtcagcccgagctggagcccacagatagactcgacaactatctcggtgaagacctcatcgactcgcattgtttggacgcgctcgagtccagcgacgcgtccagcctcggggaccgcctcagcgaggtcgagcctcaaacagccaaccgtcgacagctcctcgactacctagccggtgaaaagtatctggacgaactctacagagacgacgaaggtgccaacagcaccgacggcgaagacggtgcgtatagtagtcgacggtctactaggaagccgtcgatcccgtacgtctcagccccactgtctggaagtggacatggagtgacaatcaatgctacggatattgatgcgactcaacttagccggatcgtggcggaagaagctgaacggaagcagaaagctcgcgcggagaaggagctggcgtggcaaaaggtgaggcagctcctgatcgaggaagaagagaaggcgtcgaccggaaccgtcaactccatccagtcggttgatgacaaagcagcagcagcacctgtgcgtgacgacgtggtgggcgatgagagctacggcaccgtcaagcttcttgactcattgggtcgctctggaagtggaaacttctcgtacaaccgcagtgtttcgtccgatgtggatgcagcccccatcgtggatgcgtcactcgtgcagtcacagctttcgtcttcgaatttgagtgccagcaatgtgtcggtgccagaggttaaagagccgcagactttcgccagtcacttcgatcgcatgggcacgaaactcgcgcaattcctcagccgtggccaagcttccgacgatgaaggcagtggtgacttgttcaagaccaggcgccttaaacccccttcgaggtcgaaacacgaaccttttgtcgctggcaagtcttcggtccggatggcactgctcgcgacgttggagcagacgttgaggacttgccaaaggacggagctgtctgaggactcgatgacccgaatcctgtcgcatttgaccgccatcgatcacattactcgcgacgacatgaacaagaagaacggtcagctgaagcgaggattccgtcggctttcgagcacgcagtggtccaaccactcgaggtccaccaacgactcgagcgatcatgacaaagacttcctgcctctaccggtagaggcaccatcggagctcttgtcgatcccgtcagctccttcagtcattacggacagtgcgcaggccaaggttgtgcaggagtcctacaaggcgttcgatgcggcagtcgacctggaagacacgctggcagctttcaacaacctggtgaccggctgcggtctcaacggtatcgtggtggacgagccctggcacatttactaccacatcaaggccgccgtgtacagcaagctgagcttccgacacaagcagctcttcaagctgctggacgcgcggctcaacttggaggtctacaagcgcaaacctgctaccggtaagagcgtctgcatcgtcggagctgggccggtcggtctgcgtgctgctgtggagacggcgttgcttggaggacacatggtagtcgtggagaagcgagcggtcttcagtcgtgagagcaggcttcacttgtggccgtgggtcgtgcaggatatgactgcacttggtgccaaggtcttcttctcgcacttttgcaagaccagcacgtacttccacgtgagcacgcggcagctgcaggtcattttgctcaaggtggcgctgcttattggcgtgaaggtgcactcctcgaccgacttcgagtccattgtgccccccgctttggaggagaacggcggcaaccccttctactcggtgacaacgaagcctcagatccccaagatggagtttaccgcagtgcttggagcatccgggacgaacgacacgctggccgaacctgcgggtatcaaccgctttgtctacagcagcaaggaggagctgggcatcgtctgctacttcccgaacctggggacgtcggatgaatccaaggccaaggagttctcgtggaccactcaacgcaagcacccaatgctcgacaagctgcgtgagatcggcttcgacatggagaacgtcgtgtactatcgcggcgaaatgcactacatagtgatgaccccgaagcgtcaaaacctcttggaccggcgagtactaagccagaaccgtccgagcgcgacggatctggtcatggacgacaacctgaacgaaatggccctccgtgagcttgccaagcgtgtcgtcgacttcgctggcatcccgaggaagacggacttcacgcgcgtgagtttgttcgacttcagcacgctcacccgtgcggacaaggctgcgaacatcctttcgtcgcacgggaagaagctctacgtgggtctcatgggcgactcgctgctggagcctctgtggcacgagagcctcggaatctgccacgggttcttgggtgcgctggacgccgcctggatggtggcgcagatcggcaagaagacggacgagcagctcctcgccgaccgtgacgttgcgtatcgactcatccagcgactgtcgggccaccgccgcgacgacttgcagaagaacacacgcaagtacacggccgaccccatctcgcgctacatggtccacttccctcgcgtcgtccagcccgcaccaaagtccaattcttaacttctacgaaaatttatagggaactttgattctggtatacttgggttttcaaagctgacatcgggggcggcgtagccttcgccgttagacggacctgcaatacctccgatgcgctccaacaagtagctggtgtgtgcgtggtattttggtagtgttctagacaacgagcagcttgagcagcgaacggtggtggtggtggcaacatttgcccaggacgaggttcgactggctcatgatcacgcggatattgtcctcggagattcctgggttcagtcgacgcagctctgccacagtcagccacgtgtggtccagcagccgcttcatgtcgaagccgcaggttgagttggactcgagcgcaggcttcaggttggtgatgtccttctcgctgagcgagtcgactgtctcgcccatcgtgagttattcatgaagcccgtgtcttcatgaagcccgtgaaccgtttccagctggagacgatggcgtccccgtacgagatgatttccctcagcgcgtactcggagcatgccgtcagcgagtttgactgcatcggacgccattcccccatgcagtaggagatggtcactgggatatcgatattgtcgctctgatagaggatggcgaacagcccgtcttccggagtctctaggttgcacaccttgaggagagaacgtacttgaggaacgacttagtgaggctgatgaggtacttggtgcacttgatggcgagttgaattccctagttcgaaatagcgctgtacatgttccacgaggcgagagcaagcgctgtctgcacctcaacggcaggggttacccacgatttggatcgtgtcgccgtcgttatgtcggatgtcctcgaacccgctctcgacagagcacgagtacggacactcggagcacacccgaaaacgacaccactgggaccacctgcagcacgtccgctgcagcagacccattatccgacggagcattccgagccagcgtcaccgctgacacggtcgacacgcccaccacgctgccgccagcacgctcctccacctccaacgaatcgtcgtcgagggccaagccgctcacagaagcgccaaagtcgcgcccgtgaacttccacgtccacggaccagtactcgcggtgctgtccagcgactcgctcggcacgttcaatgcgctcatcgacagcaacgccggctcgtcctctcagctctccaccaccaacagctgcgacatcaccgccgacgacaccagagaccgaggatccaggatgctccgaaccacatgccacacctccgccaccacagcgcacgacgacaccgagtccaccagcgtcacgttcgtggataccgtcacggtctgcggcttggcagtgcgcggcgccaacaccacctcgcatgtcttcacatcgctctcttcgtcgctgttatcggagtcggagacgttatgtatgatccacgttctcgaccccgtcgtcgcgattggtgaggtagctggtgattcggctcttgcctgaggactcgacacgatcgcttgggcagttcatgtccggctttgtaggaggttgcaatccaccgtggtcggttgaaaagtaggtaggagcgaccgtggcttgcgtagacccatgcccttgagatttcaagtgaatccgctccagaaaagtagcatcagatccacacactcgcagttaaagtcgtgctcggtgtgtaccgccctgtcaacgcaagtacaaacaaacgtgcactgtaagcacccgaaaaacactctcaaacacgaaaaatacagtccgtacgcttctagtcgagcacctcagtgatagcaatggtccccatcacgaatgtgtcaaagccatggacgccaccccgctgcttctggtgccgcctgtggcacatcttcacaaacagcagcatatgcattaatggacttgaatcagcacctgaatgaagctgtaacatgttgcttatctgtcctcttaccgggaaaaactgtgcacagcatttcgtcgttaaacctcgcccgccgcatcaagtagattactttgtgcgtgcccgccagacaccagtcgctctcgtgccaccgcgtcgcctctagtccagcacggcttggtgccaggatatccactagctgtgggttgcttcccttgatgtccgacgcaaatgtgctcgatatttagcttgaaggtgtagatgtaggtgaggaaacacgacttcgacgtattttcggcttccttttgagatcagaaactttatcccggacacgtttttcatctgccttgccccgagcatcaggaaactggtggtacagcatggctaacgcatgtctcggcatgattcgaggatcatctttcacaagtcctgccaagaaattggcataggccggtaccatcttctttttcttttgacctagatgctgctgcggatctgaacgctcggtatcgccactcgaatttgaagacctttccgaggtagagatttcagggagttccaaggcttctctttcagctcgcagttgtggttgctgagctagttgagatgtgggttgccgtcgtcgcttcatcaactttgtgatgaaccctcgaatctcgttttctccgggcaaattatacctgtgtggattagccaatatgagagcctccagcattctcgccggacccatcttttgactttggtctttttcaccttgctgaaacattgcttcaatctccttttcgtaaagtgctacgtatttggtgccgtacatctctcctcgctttggccgtcttgcccagcccatttttaacgggttcacagaaattgctgagcttccgtcacggccatcagctaaacaggtacctccagcactaggcgctatgtgctctccgaaatcttgctcagatgaatccgcatcaggcaacacaaattcgttgtcgctcttttcgctgccatcatctaaatcagactcgaacgcgtcagcatcggttggcacagttttggatgcgtggactgctgcttccaatctcgtagcaggcgcctcgctcagtgagcttgggttattagcagcggaagaaacagcttcattactcgccatcctggccgtaactggaggagcgattgcgtttgcactgggataaatggtgagcatcttggatgaaagctcgccacgagctgcaaaatccccaaaatctcccccaatatttagcttgagaagtttgcgcttcgcgtacgcctcgacatcgttttcagtaacattttcttctgttacacttgtatcttgagcttgcacaggtgtaagtgagctcatgacacgtgtacgacgtcgaatttgagcactcgttttgatccgaatccctgtcatgatccccgtagcttcgtgcggtaataccaccgcctcgcctactacagctgaatcatcttcaccggcgcttaggtcgctatcgtcatccaaaagatattcgtcttcgacttcaaaatcagagacatcttcatctccatcacagtcgttttgcccactatctcgctgaacaccatcgcacactcgtgaatcgccgaccacttcatcacaatcaaaatgtaagcgccgctgaatgttgtcattgctttcttggttttgtcgttggtgagcgacagtgccagctctgccatgaccaggtcctgcacttgcagcaacaacagaagcaccatcgtcttcaacaacgcctactccagaggcaggctcgcaagcaacactacacctaccgccacttggatcaacaattatgtcggttccttcgccaacaccagagtaagcaaagaccttcattctgtatgaagggactttcttcaagtcgaaacccgactccaatggcgccagcggcaagggaaaatcatagaaaatgtcatttgcgcgatcaatagtctttgacagcgacttctccagcggccgcacttgttgagacagctccgctccatgcgctcgatcctgctcaattagctctgcaatacaattcggtaaaccaccgtctgctgtcagagcctccacaacttttgcaggtgttgcgcagtcattaccctggcggacccaagacttcaccttccttgaagccgttgcaaagtgcgcatccaacatcgattttccgtcctgcgtgtccgagtgcacgtaccgcatgacataatatccatgaaccgctccgagaatcggaagcatcaatcccaaatacgcattttggtagttcgacgcgttatcggactgaaatgtcaagcgcgtgacatggggcacgtcccggcgaagcgaaagcagaagcgcttcgaccagcgctgcagtcgcctccttgtcttgcttattatctccattacagatctgatcaaagtagtgcttggtctccacggcctccccactgtcttcatcgtacatccaatagcgcacaagtgctccatgccacgacataccacgcttaccgtaatgttcgactgtcttctcacgaaaatatgtcggctcaagtttcatcttgaagtcgagaattactaaagcctcgttggagtggctctctggcagcggttgcttatggcctccgccgcttcacggagcgcccactgctgatttcgtacgcgtatgcgatgacctaagaagagctccatcttcttgtgcgactcctttacaactccaagtgtggttgaatcgacttctgcaactgtcaaccgctttgtaacgtcgtcgattagttgacacattgacacacaaggacggcagcacacggtccgagagctttggtcgcccggtttaggcagggaaagcccgtacgtaacttgatgtcttgggcacttagagcaatcggggtggctgtctgtgtcgatatcaaagccgcttccatacttgagccactccctcaatattgacaatttgggtagcagctcgatcgatgcttcaggaagtaactcgcgtacaattcgctctagcagcctgaaattgtcgttcaccaaaaaaaccgttacgtaatcaacggcacaacgcgcttgcacctcaccatgagtcaatgcaccagcaagtcgataaaacgtgcttctggtaatactacccccgcgcgcacggtactgctcatagatgaccgtaattgattttcggcgttgaattgacggagcgatctgtttttttgccatcaaccttggcagtcttcgtcccccaagaaagaaaagctacattgtccattgacaagacatgccggatagcttcatctattgtgcttttttcgtacttagctcgcgaccacttcggcttttcgatccgaccctcctctagaagcacttggagatccttttgccacgccatatagttttttctgccaaatgaaaactcttcgatctgctccgccgtgttcgtcaaagttgatagaggaaacgcgtcacacaacagggctcgaacacaccgccgctcaactgatccacgttttgtagccatgaagacgcggactggtgtcgcgattttagagattgtagagatctggcctggactgatccacgatcgaaacagctccagaaacacagaagcagtttgtttacgacacaatatcgtgcaaatgtgactcagcaagttccaaaccagtcgcaacgcggcagctcgttcttgacgttcacgtgcgatccggggctgatctccaaatgcattttgcgattcctgctgacacggatcgttgccagtcccacaagcacttgatgaccaaaatgattcagaacaacgcctttcctttgacggaagttttttcttcatcatattgatctgtgtttcttcgcaacctagaaactgcatcacagcaaaaatgtccactcgttttcgagctttaggcgttggcgtgaagatagccggactcaggtacattccagcttcgttttgcacacgcagaccagcagacgcagccggccctgcaccgacactcacaggagacaatatatccatggctccacaatcactcacatctgactccgcactcaagtttacaggcggcgatatatccacatctccacaatcactcccatcgtcaatcagtacattccggactctttgagacttctgtcgcgttgatcttttagccacacttattgcaggatccacgctcgacacggacagcgcacgctcacagccctccagcgccacagccgctaaaggtcgtcctcgcgtccgcgcacgctttacggatggagaaagtccgtcacagctacagccacacctcgaacacttccaacagcctgttacaggacaacgcggcctcttgcagccgcacgtaatgtcggggaacttgctagcctccgtctccccgcgctgaccttcgttctcgctcatttggattttgaattctgcgggggccgagggggagaaatacctccgagtggaccgccgacaaatcgaaggatgcatgcactgataccactctgtgaaatgtctaaaaactcaaaatccgtacgattcgcttcatacagcactactactagagcgcttgcggcacgtgggggcattgcttcatgtgtctagcatcgctatattgcatgaagtacatttctaaccggctgcccagccagaacacgatccgaagtaccataacgattcgactatttccgcattatgtgtttttctgtgttcccctccaattgtgttcgcctcttagcgggattttctgttaatgccgaatgttgtttcttatgtgggccagagaagtatgtattaccataattcaaaaatatgcccaagcacgtctccataattggattcatttaataaaactaatgaaatattatgggtgtattttatttgtcaataatttgtttcaaatcaataatggaattcaacagtattttcaaagatcaataaaatttgcgcgggagttcacacttcgaaaatggaggaggacgaggacacgtacggcttcgggtccttctcggagctgttcgacgcgggggcgtcgcaggccacgaagcggctggacctgggcgcgctgagccgcttctgcatgtcggagcggctgctgtctcgcttccagcagcagcagcggcggagggacaggcgcggcgccatgttccagcacgtcgccgccaagttcaacggcgtgggcatcgagggcggcctgggggcgctgggcgtggcggcgctggaaggaggcagtggcgttgtgtggctgcagacgacgcagtcggactcggacgcgctggagcggcgcaagaaggagctgcaggacatcaccaaccacgcgccgccggagaccgagaccaagtcggcggcggcgctcttcgtggcggtgaagcacgtcgcaacggtgctgcccaccacagtgcagaacacggtgcagggcgtggagatgaagctcacggacggcaacaaactcgagctgacgttcatgccaggtccgatgctgagtaggattggtgacgcaaaaaaaattattgataactttcttgttgctgtaggaccgtttgccggcgcgacgcatcgagacgagttcttgcaggcagtgaagaagtacatgactgctgctgctggtgatgagaagaatggtgaagtagctgcgttgacgccctcaaagtcggaacaaaatagtgtcgcgacttctcataaaaaggaggaggttgcaggtgacgaatcacagttacaagtggatagtggaatgtctgaatccgcacagagggagaaattccggaagctggtgcggagatacactacggtcgattcgatgagtgacgaaggaattgagattgcgaagcaggtgcacgcagggactggataccacttgggaccgacgacgaagcagctcccgaagttctcggctgactcagagtaccgcaagaagacggtcgcagagttgacatgctacctgaagcggatgaaccaggagtggggcgaagcggactcgcatcgcgagcggcatacgaaagccaagcactcgcgcaacgatgatgacttgtttgagtacaccgacacggtcacaggggcgaagatcccggtgcgaacgtacgaacagcggtatctggagtacgtgaaggcgcatgacgtgaatccggtgcttcatctgtgtcctgcccaaggtgaaaaggcggagaaagattcaactgcggtgaacggagctataaatgctctgcagtctgcgccagcgactgcatccactgtgactgaggaagaagcaaaaagtgcttcggaattttttattgcatcgattggagtcgatatcagcaaaagctggattattgggaagaatttcttctcggcggaacccgaatacgtaccagcatctcgtgatggagaagaagacccagatttccgggctgctgtggatagaaagcgggcagagatatggaagagttggcgcgacacattcgcccgagtgtgtggtagtcgagttgcccaagacgagcccccacagcgcagatcagtatccagagttatgcaaaaacgctcgcgagagagaaggcggagcctcgttctacccagttcgggggagcttcgatcgagcgttgatgcaaatgtgtcgaagagctcggagcaagttaatcagattgcaaccgatggcgagtccgcgcgcaagcggagtcgatcaacaatgcagaagtctgacacagctcagaaatcacggcggaaggcgcggcgtcagagtatcgttagtactgtgagtttgccgcccactttcactagtgaagacgaacaaaagaagaccccgcgcagtcgcaaaacgccgcaaagtgcacgcaagtcgcctcgacctaacggctatgctcgcaaaactagcgcactggagatggtaggaggagaagacgagggtttgtgccagctttgctacggcgaacaagctttcgtccacatgaatccgtgcgaccacgccgtttgtgcgtcctgttggtcgcggttgtctccatcaccggggaaaaatggctcaagctcgcggcgagtgtgtccgtgggatcgtgaagcagtaacgaaacggtagaaatggttgtctctaacaagctgaagtattttgcggtgagcttgagagttgttagtgctctttgcttggcatgggatgaatgctgggggtttcgctggccggacgatggctttaatctacaagtacaatagttgaggagtgaccaggatgcgagcggctggatgctttggaggtacgtacacgtcctgcagaacgcgtttgccccgagttaacgtcccatgctagaaaatcggcctccgaacagggcgacgttgacgtcagctcaagcctcggccaccgtccatcggttgctgcagtggaagaagcgcaatgacgctaaacgtgagcaggtcgagtgttgtaatggagagacggcaaacaagtgtgctaagtgacaggtgctgctttcaggcgaggtgagagcaaggcttcaagaagaagaacgcgtcgaggaggaggaaaactatcattcattgctcaaggcacttccactagaccgagtagaagccgctgttattcgcaactaccaagcggccgaagagctccgctggaagaaacggatgcttcaagtgattgcagagcagcagcgactggatgaggagattgaatgcacatttcgaccgcggctagtggctcggcctcgacgagctgtgaggaccatggaggcggccgatacaaaacctatgacgtgccgtagaccttcctgtgctgctgcggctagagcagactcggttaaactaccgtctcgtaggcaccgccgagctgccacagaagaaaaggaggacgtgtttgagcgattgtacgtgcgcaaaccccatgcaggcgcagcgacagcagcagcccaagacacatcgacaatggtgaagcaaatatcgatcgagactgaggccgctttcgtcgcccgacaagaacgcgaccaaatcgagcgacaggtaaacttcaagttgctgcatgcggttgatatgtagctttcctccgtagctgacaaagagttggtgcacagcgtcgtcgtattcagctcgcgaagcagcagcgtttccctcacaagccaaggctctcgaggcacacacaggagatatgctcggcaatgcgccagcgtgacaccaacaacctcgctgataactgccgacgccaacgtaagcgcttcgacccacgcacccaacaccgctatacactgccgccgagctcttccagcagctgcaacaagtcagacgttgcctccaggccgttcggtctgctcgttcaggccttacgtcaacaggagcaacgcatgcgcagcttcagcaagtgcgcctaaaccaacaagacaaatcacacagagttgagcgctaacctattatattccgtcgttaaccactttcttagttaatgacgaaactcgtgagacagcggaatgggcaaactgctcgcgcccgctacgcgatcccgcaagaagaatggacggttggcagcaggggccaaaagtgcacacttctccaaaggtcgcgcagggaccggacacggcagcgccgattccaccccactctccattgctggaaaaagctgacggcggagtgattcctcgaagcggcgtagtgctgggcaaatattaagcgagagacaatatacacatcatctggctcccagcacttacagctcgagctccttcaccgtttcccacgtgaagtccgcgtcctcgcggccgaagtggccgtaggcggcggtcttctgcatgaccgggcgcttcaggctcagggtcttctggatcatgcccgggcgcaggtcgaagttcttcttgatgatctccaccaggtcgtcgtccgacagaccctccttcaccgtgccgtacgagtcgacgtggatcgacagcgggtagggcacaccgatggcgtacgagagctgcacaaggagacggtgggcaaggcccttggccaccaccgacttggcgacccaacgggcggcgtaggcagccgagcggtcgaccttggtcgtgtccttgccggagaaggcaccgccaccgtgggcgccccagccgccgtaggtgtcgatgatgatcttgcggccagtgagaccggcgtcgccgtgcgggccaccaatgacgaagcgtccagacgggttcaggtggtacaccgtcttgtcgtccaggtacttctccgggatgacggtctggatgacgtgcttcatgaggtcggcggcgatctgctcgttggtcacgtcgtcgttgtgctgggtcgagatgaccacggtgtgcacgcgctgcgggatcatgcggccctcctcctgcttgtactccacggtgacctgggtcttgccatcggggcggatccagtcgagcgtgccgttcttgcgcacctccgtgagcttggagcccagcttggtggccagcacgtgcgacagcggcatgagctcgggcgtctcgtccgaggcgtagccgaacataatgccctggtcgccggcgccgacgtcctcgtccgtgaccgagtccacggactgggcgatgtcgggcgactgctgctcgatggccacgatgacgttgaccgtcttgtagtcgaggcccttggcggggtcgtcgtagccgatctccttgatcgtgtcgcggatgaccttctcgtagttgacgatggccttggtggtgatctcgccgaagatcatgaccatgcccgtcttggcgcacgtctcgcaggccacgcgcgagttggggtcctccgacacgcaggcgtccagcacagcgtccgagatctggtcgcagagcttgtccgggtggccctcgttcacggactcggacgtgaacaggaaggtgcggtccttgggggcggcggtctgagtcatcttggtcggaggagggagacgcggggcttgggaagcgaattccagaatgagagcccacacgggtggcgcatgggcggccggcggtcggccgttgccctcgccttcggaagaggttaaaacctcgggcatgcttacgcccgaaaaacctcgggcttgagtggtggaaccagcgcgacatgctttctgccaatcagatggccgcaacgctcgacgtggagactggtttcagctcccgagcctacggtacgcccgcttcaagaagggtaggacgtggctccgtggcgccgcatttatagcgacgaaagccgaggaaagctgcgtgcgctcgaaacgctttgagtggtgccgtcctgcgtcctgggcgcccggagccccacgttttacatcgatgctgacgtggccggcccgaattggcctcgccgctggccgggccatgcttgctttagcaccacccatttcaagtccacgccttgttttgtatccatcccacatacaaatccaagtcatttggcggatcaagtttggcaggtcaccgatcctgaacacgcagatcttcccttgaacacgcaattggcagcatcaacgacgaagcgagcgagctggcgatcgtcgtcgttactgcgctgggctgcgatgacagagagctctaccatcacaagcgcaatctgcctcagctcatggcggtgctgcgctggcctacttttggctgctgcgcgctgacagccccacgtttggcagcatcaagcgggcaacgatggcggaacggctgagaccatcgcgttcatcacgcaacgattttgcccagtcgattgcggagaccaggggcgtgtaactccaacagttatcggccgatacgaaccttcgagcggcgccgtggctgctttttgggcagagttattgggggaagcatgtgctaaatgcaggaagatccgtgtgataggaacttcagatacatgtacagttttttgtatgcgtcgccgcagtttccaccatgtcattcactgctctgtcaaatggaagtgcacgctgaagtgcctcgttgaacagtggcatcctagcactaaaatcgcgaaggatatctatactttcgcaacgatattaatatatgggcgaagcagctacactaccatgaacgcagcctcgggcaagaaggcgaagaaggacgtgggcaaggaagcgaaggagaccgaccatcacaagtttacctccgaaatcgcatgtgtatgccgtaccgtggtcaaaagtcgcacctcctcgtgaccagcaactcatgctgcacgatgaacagcgtgctatcgacgttgacgtggggcacatgggacgacgccgagtggggcgtcacgcggtctgtcgacacatctgcagacatccccactaccactgccactgccgagtccgctgagtcgtcccagaagcagcgaagtctccgcaaactgcgcaagaaggggctgcaggcgcccaagaactcgcagctctggttcgaggagctgctggagcgcgtggagggcacgtcgttcgggcgcaccaagtccacgtaccgctgcaacccgctcaagtgcctgcacgagtctgaagaaggttgcaacgaggtggccgagacggcgcaggggatcccctgggccgatctgcccgacggaatccacccgcgagacggaaagttgccggcggagcgcgcaaggaacaaacggcagcaagtggacaatttagcgatcttcttgcagcgcatactcaggtcggttagttgcggtgtattggcacgatgccatcgtgacgatggctatatcgaaatgagactgattaatgcactgtaaaattgcagaccgggagatatcgtggtcgagttctgtgccggctcgggatacgtagcgctgccgctagcgtgcctgtttccgcagtgcacattcgtgcttctcgacaagaaggaaccctcgcttgccatcggtacgccaggtggcttctggtagtgaccaacgtgagcgaactaacccgatgttgtatcgatactgtgctgtcagcggaggagcggatcgcggcggcccagttgaccaacgtagagatcttctgcgggtttattgacgactacaacaagcctttcgacgtgggcattgcgctgcacgcatgcggtgaagcgacagacatggtgatgcagaagtgccttgcggaacgggctgcctacgtgctggctccgtgttgcgtcggcaagatcaagctgagcgagttggcctatcctcgctccgccacactggctgctgaattgtcacgaaccgagtacgaagtgctggcgaaggctgccgactttggacactcgagtagcgcagctgtggcgcacacggacatcaaccgccgtcgccgacgctgcaagacgctccttgagagtgaccgcaacatgcaggcggaggaagcgcagtacgataccttcatgtttgtcatgcacccgcctacagccacgcccaagaacgacgtgttggttggaattccaagaagccaggaagtgaaggacgccggcagactgtttcagcttgcatgcgaatccacgctgtctaccgactcgctggttcgcaaggccatgctgagtacgtaaaataaatagagttttgtcgatacttgttgatactttattcgagtcgtctagccttatcggggtgcgcgagacaacgaagctttcactcgctgcagtagatctcgagtatcggatgactggaaatcgcgacagtcgatcagcaatagtggagctgtgcctggagctgaagcggccgcacccttttcaaacgtcataactccttccaggttcatgagtgcgaactgcatgttcgccgcccagccatgcgcaacttgcaccttcgtttgcattgtttgtaggaactctgagcacgatactcccatgagtctcgtcacgaagtcctcagctacgtcagcctctttcgtggccgtgcaatcttcaacggatactcggagctggtatcgccccgtgttgaattgaaaccctaccacagatttaatacacgcgcgaatctggaatctggtagctgctgtagactgcagtggcatggacagtgttgggagtcttgctgtgaagtactggaacgggcgagttgggtccagtggcgtgaatgcaggggctgaagctggtgtaggggtggagttgctatgtcggacaaccgtggaggggagaggattacgcgcagccatgctttcctcctcgttagtagtcgtcgtgcgcagtgatgttgcattgtgtggggtatgcaccgccgctagctgtcgatctgttgacggtgaacgcggtcgcttcctggagggcgctgcactgctcgtcgtggttggtgcgcgaacagtacgtttcgaactagcaggaatcctaggagtcttcgggctgtagaagagatgctccaccattgggtcggtagtgtcgctgtccatgtcttcgtctgacgaaggtacatcaacaaacactgatggtatggcgccgcttctaggtgggtcccaagcgcttgcgctggccgctgtgttgcttgtaacagcacgacttgcaggctccaggtttgacggtgtagatgaatttactcttctcgctgtgtttgtttgaggagcactgctaggtgctgtggtcgtaatagggggtctggcaggtggcggttgtggtcgtgtcggtggaatatccggcgctgactgctccgatggattaaactgcgacgtcaccagcgctgccgagtacgcgccagcgctaactccattcggttccgccgcttgttgcacctgtccgtttccgcgcgctggttggtcggtcgtggtctccagtagctggcaattatcaggagccagcagcagcaatccatgcctcacggggacattctccaccacgatcttggtgccgcgtgcgatgttgacgctgaactgcggcagtgaggcgaactcgaagccgaacaccaattggtggccgtctgtgagaccgagcttgagcgtacgtgtgggtcctgcagccgaaaactccgtgcggtgctcgtagttggcgccgatgttggccacgtccaccacctgctcggtcgccaacgagtcagtcagtcagtcagtcaattgcaacgctgcaaaggtccaatgtatgggccgctcgcacctgcaggatgcacatgccctggatggtggagccgttgagcttgtcgacatccggcggcagcgcgggacggcagctttggtgcagatccgactgcatgagcctcccgaacaggtacgcgccatacggagcctgccgctgggcgccgccggcggcagcgcggaacttgtggaactcgcgcgcctcccactccgggtccagcgcctcgtacggcaactgccgccgctctcctcctgccggcggcattggcattggctgataccaattgtatgcgccagatgtggcacacaccatttgcgaccttgaagtgctcgcagctgctacagcacacgtcgctcctgggagcggtttaaagcctagtagctagacgacttacgtggggagatgcagcgcgggtctgcctcctccctagcaggaacggactcatcctcttggccagcggcctcagacccaccgtgaggacggttacgcccaccgctccctcgaagggagggcgtcttcccgtccacgttgtttcttcttccttcgtcattgccgtacgaactcggcgggacgcggtaaaccttgccgtcgcgccataagcagggcttgcatgttgacggcggcgttgacgtctctgttcagaaagtttttcttgcagttcttgttggcacaacgcaatacggatcgatcgtagtagagaggtctttcgtcggcgtccagctcgccggagccgggatcgtctggatcgaggaagacggccatcttcataggttggtagcaggcggaacacagtttgctcgtcctgaactcgtgcaccttgaccactatcgctctcttcctcatagccttctcgagaggtctcaacgggggttttggccctcctttgatgttgtcgctctggctccagttgccaaatccgacgcacacgtgtgacccggcctctggtatcagccattgggcgacgtcatctacagcgacacggtgctctacatgcgagaaaaatctccatttcctggaattgtgtgcgatgccgaaatccaggagatagtccaggttgagccatacctgctccatccgaatgaggaaaactcttgcgtcggccgttttgaggcagggaaggctacagtaaggaggccggcgtctccacgatgagcgaggcgacgggcacggccgagacagcagatgacggtgttgcagttcacggccgagtgggacgtgaacccagcagaccgcgcggtcggcaggatcggcaggacggcgaagatctggaccacgggatcctcggaccccacggatgctgcgaactcaacggagcgagctcacttccgaactggacggctaacgagcaagccggctggatctacaacgcgtgctcgagagcgagcacaacgaacgaacgaacgaacgaacggcaagcggggcgtgacgcagagtcacgagacctcggtggacgacggcgaaggcgacggatagggagcatacggcttccgagtctctcgacggctgcgacgagtagggtaggcgcgagtgggcgtacacccgagtggctagagacggcgtgacgaacggagcccaagtcgtgcacagcaggtagacgtgtattgtagttagacggtagcaaataccgcgactagtttgcctaaataaaataggtgtggctgtcagtcggacacccaccggcgcagtgtcaggcgttttgacactgtcggccagacggacttcagaccgcatcagcacggtcgcgaccaaccccaagcgtgtggggctaaacacgttgcactactgattgcgatctggtattcaggaaatcggaggcgcagcttctcgtgcaacttgttgaatttgttacttccactcatgtgctggtattcgcctgccttgatctggtgaactcgctgttcatgctggacctttggtagtttcggttcgcgacgtcttcgaactggagttcgtggaggtcccgttgagctcacgcggtcttccactgggcacctcttgttgcggtgccgtcgtgggggtttgggtggtgggggcttcttcttctttgagcgaagcttgccgatgatcgcagccgtgcagggggccttcttgcctggatcgacacccacaaacccgcgagcgcggattccccggagggctggctcgggggcggggtagggagccgagtcgctggcttcgctcgctgtactgggatcctgctcgtgtggtgtctttctcgggttccgattcaggctcgtcctccgttatttcctcgccgttcatctccgtcacgagttattccgaatccgggtcgtcatcaaactcgtcagtgtcctcaagttcttcatcgtccacgttttcctcacttctctctacggagcgtgccaaacgcgtgagctgcaccattaacacggaagctgcgtacccatctgaccggatcgagtcaccgaagaacctagcggcgtgtcttacctctcgtccactgaaagaccattgaagcgggccttgccgatcttggtgcgccgcgtcttgaactgtgtgatgttgaatgcgcgcctcatcaactcggagccccgctgagtaaagtaagggtgtgtcgggacgcggttgttgggtgtgagttcaacaccaaggatattctcgcccgtagatgcgcgagcagaggtgcgccaaagtagacggatcgatcttgatgttgtagagcgcgaacgattgcgacagcggtagaaggctgaacatcttgattgtcttagagcgcttctgcttgggtttcttagcgcccttgtccttcttcgtcctctctttcctcttccatttcctgaatcgtttcttctgagccgtcgctgtatctccactttgcgcacgctgtcgccgctgctcgatctgcttttgctcgacaaagaccatgatctcgtacagcttccgcacgaaatagccaacatgcttcttgatgacgggtttcaaggggacaacctgctccagctcaccgtccacaccccacgcttcggatcccagccactccttcatctccagtacttcatcaagtcggggatgtcaccgcgctcctcgcactggcggagtacgtggaagttcgcgagggcccaagcttcggtggtggacttccgtaagagtcgagcgcaaatctggatctccttgatgagctccgggtggggacatacccgaccgagcttacaccggaccgtggagcaggcataccgccgcttccagtctcggagcctgccgggagggcggcaggcaacacgctccatggcgctcggggccaattcagatgtgcggggcggagacgattgacgggaaatctggaaatgccacccagcttccacggaagcacaagtgcttcaatggcgtagtgggttgaggggatagcctgtattcgtatgggaggatgtcgcggacgtgcgatgctgcccatataggtgaggagacattcggggcagttcgggccgagtacattggcggctacgtgaatgacagcgcgcgcgaaactggtggctgatgtccatggaaacacaagtgcttcaaacggtaagtcgtcagtatacgcgtgacggctgccagccattaatgtggtggagcatcccgctggagctttccgccagcatgggaggaacgccatgagcttagcctctcgtgtttccatgcttcaagaggaaccgcgattttattggataaaattggataattggatactatagaatctatagtatagataggccagcgacttcaacttgactatcgccgccgctaggtatgctgctgcggctgctgctgttagtcggccttgttgccgtccaggtccagatccaccgtctcgggcgagacctcgggcacgttgtcgaggtcggggtcggcggccacgtcctttatgtttcctccgctctcgcccttccgctcctcggccctgtgccgccccgcctgctccatcaactcgctggccgcgtgacattagatctccatcacgctcttctgcacgttgacctggacgatgtgtccgcttccagctgcattgtacgatggcattgagtgtgcaaatggagtcgattcggccgcgttcgcgagtccgtccgtcgcgaactagcaatacacacaaattgaaaagaggttagagacattcggctgctattttcaagacatgaaagcacggtcaacgtacctctggatgagcgcgcaacgccaacacttgcggtaattcgacaaggtgcagcttggcgtagcggagcacaacgaggccgctcccgatggaaagcaaatagaacgcccaggtgcgcattactgccttctcgcgcttagtttgcacgagtagcaccaggcacgccgcgtatgccactacaaagagcagcagcagaggccacgtgcgtctgcggtagtgtagtttgatcttgttcgcactcagtgatgtcgggaaacggcccacgaacttgtcaatcttgcggatgtagtagcccaggatcttgagtttgtactggtcttccgcctggacaatctagccccacgcacacacgcagcatcccagcatcagagccatatccaaactcctcataaagtatcacaacagggcgaacctcagtccagtagacccagcgcatctgcaatccttcaggccataggacatagtaacggtactacgcaacaccattgacacatccacagctcgtcagcgctatcccagcctctccacttcattgcacgtcgcaccagcgtcagagccagctccactagacacacgaaggtcaccacgaggaacacgatcgtgtccacgaaccagtcgcgcgtgcagaagacgatgcaggacggcaccacgaacacgagcagcacgcgcgccagccccagcgcgaagtagcggtgctcctgcgtcgtcagcgcctcgttgctcaggtgcggcgcgaagtggcgcacgatcttgcgcctgtgcgcctggtccccctccgtcgccacgtacatggggccgctgtgcctgccttccttcgtctacctcctcagcttcagcttcagcttcttgctgtgtctctcaacctctcgtgtttccatgcttcaagaggaaccgcgatttcattggataaaattggataattggatactatagataggccagcgacttcaacttgactatcgccgccactaggacttcttggggggcgtctaggtatgctactgctgttagtcggccttgttgccgtccaggtccaggtccagcgtctcgggcgagacctcgggcacgttgtcgaggtcggggtcggcggcctcgtccgactgcggctggctgtacgacttgctgtacttcttgctgaagcccacggtcgtggacacggtgctgacggcggccttgaacttgcggcgcgcgttgaagcgacgcagctcctccagcgcgctcgtgagctgcaccgtggccagctccgtgcccgtgacccagcggtgagacagcagctggtccaccgtcgccctgcagaacaaaactccaattaatttcatgcgcaatatcagagcaaaacagtccaagcagcgaacgtaccgcttctccgggtccacgatgagcatgtgcgagatgaggtccttggcgtcgtccgagacgtggtcccagtacggcgagtcgaactggaacttgcccttcttgatcttcttgaacagcgcgttgtggttgtcgtcgtggaacggagggtaaccgcacagcaggatgtacgtgatgacaccgatactccagatgtccacggccttgccgtacggcttgccctccaggatctccggagcgacgtagccgggggtgccgcaggctgtgacgaggccctcgctgtcgaactcgatcctctttgcgaaaccaaagtctgccagcttgatggacgcgtcgtcgtccttgctggtcagcagcaggttctcgggcttcaggtcacggtgcacgatgttggcgtcgtggcagtacttgatggcctcaagaagcagcttcaccaggtcgcgagcttccctctcgttgtagtacgactagcaaaaaaatatacaccgtcagtaaaaatacccctcaactgccgtaacaaccgactcaacaccaaccttctcgacgattcggtcaaagagctcgccgccctccatgtactccgtcaccaagtagtagaacttctcctcgacgaagaagtcgtgcagaatcataatgttcgggtggttcatctgcagcatagatagatacaatgaatagtcagaactttccgcaccgattccgtcaccgcaaacaaaacctccagcgcacctgcttgagaatagcgacttcggttgtcaacgcctcaatgtcctccgccacaaggccctcgcgcttgatgcacttgatggcgtagcgctggcccgtgggcttgtggatggcaatgcgcacgaccgagaaggtgcccgagccgatgaccttgcccagcgagtactgctcctcgaagctgttggggttcgtggccgccggcgcgggcttgccgttagccgtggcgttgttctcgccgttggcgtccacctgcgcgctcccgttcacgacatcctggtcctggcagcagcagcagcagcagcagtggaaggagaaagatcagcacacaacagaattatgctgctcaatgaagacgacataccggcttggaattgacgcagcccatgttgcctccttgctggcaggtcgttcgggggagggaagagtcagtcgagtgctgccgccgcttctagttgcgttgtggtgttgccaatgcgctggtctcgtgctaagagtgttgagccgttgtgccaaagtctaaaaacggcggtccagtctcgcttttggctaaaaatagacgttttgagccaatcagtagggaattaccacttcgggtttaggggatctatttcaagtgattcaagctcagagggttcggtatctctccatcgaagatggctgcgcgctcaggtggtgaaggtgaacttgtcgccctgaagcagagcagcacgcgggtggcttagatcaagtttggccgcccaggaatgtgcggagagcgcacctacctgtcggagcttcgtgttgagcttgggctcggcgtacgagacacgctggacgggcctcatggtgcgtctgcggaacgggctgcgttgctgcgcgaacggcgcgggcacaaacgccgacgtggcgcggcgaggttcagaaatcacgcgacgtggcgacgttcgggggtggtgggtcttgcgctgctggcctgtccgcttgcctaagccgtagtagtctccctggcacgcacagcgcaaacgttaggagccacgaaacttcggagacctaccttgcaggcatgacacacgaacatacgtacccgccggagcttcgtattcaactttggttcgacatacgagacgctagcatctcgtcgacgcagccgtctcggtgcagaagcctacaagcagcagagcagtgaacatggtgcgtggagatacgatctcaacttgttcaaagcgcacctgtgagctcgatccagggctgatctgtggtgaacgttcggcttggacttgcagtgcttgtgccttgccattgcctcgagaggtactgctatcgatgacgacggtgtttgagctaagtcttgcattgcagtcgcttgaggaggtggctggctttctacttgaagtgccatcgtcgtaggagtactcccattcctggtaccattgaaatgggtattagtgccttgttagccggtcggagtgagcccagtatacctgtatggcatccgtgccgatgatcttgccgtgctttacacttttggcatacattacaaattgtgattgcattcttgaggcctatgcattcaccatgtaagcacactgccatcactcacagcattttcagtcgtaccggtatctgtgtagacctgttacttcgacgaggagaaagcggcggctccggttctagatcttgaccgaggcccccaaggttgcattgtgctgcctggtggcgcactactccaggaaaaagccctgtcagtgttccccacagaagcgaccacacttacatactcgcttaccttcgacaggcttgtgtcgggcatccatccactcgacaactacccggtgcaacccgagtcaaacttggatactcaacgagcatagccagcatggacaaacctttgcttgagaacacagcggtctgcgctgctcgggctgcagtaaccgattgtcagtactcaacatgcctattgacactcccttgtagctagctgcaagatacgcacgcaatgcctacctctcgtaagttcctgcttggttgcagtctgtcagcgtgaccaggaagtttagaaatcgacccgcgacactgtcacaacaacaacgacctcaccagcgccttggccaattggcgattcttctcggacagaccgccgaccttgtcccgcaactgctgtagctcctgcatgacgctgaacgcgcgcgcagcgctggtgccctgcaccatgctggtcaatcaatgcggctgcgtcctttcgcgatcgctttctgaacagatttgacaggtgctacttaacgaagtcacttgggtacataaaacacgtcggtaaaatacagaatcggtgaaatggaggaagtgcaagtgcaagtgcaaggcgatgccgcgttcacgtcgtttccgggcgagggcttccgcttcggcgtggagctggtagacgacgtagagcagcttctggctggagaaccaagtgaccaagaagcgctggtgcgtctgcagccgacggctcaaaacctcggcggacattaccgcagtcagctgacaacctttggttactttaatctactgtatgctgtaggacgtgcgaggtggcggatgttgctgcgtttgctccgacgggtgtggtgctgccttgggagacggtccttcactatgtagcggtgcgtgttggtgcaatggttcgtcattatgagcgcatgaaccggcattgacacgcagttgctgccctccaggccagtctgaaggagtctgcagccgccaccgatagtgccgaccagacaccaactctcgttcgggaagacgacgaccagaggttgctgctggaggtgaccatcaggctgggagtgacgggcttcgcctgggcgcccaaatatgttttccccatgacactcgagctgcggaacgctacgccgacggacgtgcagatcaaactcctcactacgcaggtgcaagaactccagcaggaagtgaacacgctcaagaagctggtggaagatgtgctgcgcgttcaggccaagcctgaaccagcggcggcgctggtggaggagctccagcaggaagtgaagacactcaaggagcagatgcaagctgtactgcgagatcaagccgagtcccagccagcagcagcagtaagctcctcgtcttcgccagcttccgagacgccgtctgacgttgattctccccatcgccagccaacgccaacgcagtctccagctgcgggttcaactcaatccccgaaatcgttgccaacgccttctcgtaaggaccaagtgtggggcgacatcatcgggcagtcatgccaccgactcgtgcaagttgatgaataccgcgagacgcgcaattccgacggcggagtgatgcgcagacatcgccaacgcgcctgcaaagtgtgctctgccctgaagggggatcgcaggcgtccatttgaaacgtctttctactgtgaagagtgcacggagcaacacaaaggcggcatggtgtttctgtgcgacaaggtgcggcatcatgaggcggaccaataccaaaatgctacgtgcagccagatctggcacgtgatgtggaaaaacggcgaggatatcccgttgaatggagcatccataagaatgcggaaaaagctgaagctaagcagctcaagtgagggtgagacggcggcatcgactgcgatagcaacgcccgtgcgcaggtcaacacgcgaaggtttgtagcgctacccctaaagctagctgctaacatcttcacttttggctactgagaatggatacagcagcacggctacttgcacgtggtttcgatgactggcaatcgtgtacgcggtttctcctttctgtagcgatcaagtcaaggatcaattgctcgtggcgactgctttgtgctaagacgcgcgtattgaacgccgtttactgcggtcgggttagctccatgctggagaagaagctggacgacatcgacacgcccaccttgtgcggccttgtgcaggggtgtacttccgtcgtgagcggcgtaattcacgttggatccagctgtgatatgcagctcgcagattttcacatgtccaaggagtgctgcgtgattcagcgcgctgcatccggtctacgtgtgaaacaaggtttgatgagcgctgcaggccaaccaagtcagcaaagactcatttgtacctggtcggtgatgcaaggatcaactctttctttcgtgagaagtcggcgcacacggtcgtagtctctgttgagtacgctgacgtggagaggggtggttgctgtcgggatggttggatcacgcagctggtcgtaatagcgcttgaagggggcgctcagatgtagaggtgaactcattgttaaggtgcaagtggctggagcaatcatcacgaggaacaactacatccgtttcaagatcaagaagagtgtttttggatttaagcttatcggtgtcccagcttggtgctcgaactgcgcgtggactcgggcctcataacttcacttagaagatcttcgtagcctccgatggtggcaagatcaccgtttgcatcgagtgcgcgggcagagttagagtgaacgtcttcgagtccgtctgtttcacactcacggtcactgctgaactatcgcggttcatgaactggatcaccacgcggttgtccggagtcacgaacgcgcagcggtggaagttgcttagtgtcttcgtcttgggaaactcgatgcgcttggagccagccggaatgaacttggagaagtggcccatgatgtagaacatcggctgcttgtagaactcgaccccgttcttctcgtccaccagaatgggtgcgtcgacgtagttttctacccaggttggaccacccgtcgtgtcgaggaccaagttccagtcagcatatcccgcgacgtagttgttgatgtcttcaacgatgtcatgagcgtagttctcccgcacgggaccagctcttgtccgagtccgtaagagaaactccagagcccgtgcccagccagcttggcaagaacccctcgcacgcctccgttgaaagcatgaacatgtctgggtatttctcgtggaaggtcgacagtttgtcaaagtctccgccgataccgaagaagaagaagtccaagtcgcggtaccagtgcacaccaagaccactgatgtacttcagggcatccgcgtcttcaaacgatgcgaggcggtccaggatgccagacttttggtcgtctccagcgatgatcttcaggcctgggtggtccttcgccattcttggtcctaggtcgagtttcacaaagtcgcgctctttctccgcgctaaggcgcagcgactgccaagccaccgtctgcagaatggacttggacggctcgttttgaactgtcatggcccagaagttgatgccctccttggagtacgcgtcgaagaacttggagtaatacagcgccagcgccttccagtatttctcgcccgggttgcccttcagcgcacaattgagcgtcgtggtctccgtcgtcgtctaggtcggaggggcccacgaagaggcaaacagcgtgacattacgcgacgaagtgtttagagcacgctggataaggtcgatcttgtgtgaagacggcgacttgtccaccgcgatcgagaagtgctccatctcgaagtcgtccaccacgtcgttgtacgagtagatgctcgtggagaagtccgtgtacccgatcggcacgcgacccaaagtgtactgcagacccgtctccgagaagtactggtccagcaccatttgctgcagcgtcgacgataacttgtacacgttgatggccgccgcatccgtgaaagcgccaccgaagccgatcatggtctggtattgcttcgacacgtcgatggagtacgtggggctgctcaccgccgtcgagtcaacgttgacaaccttataggcgaagcggtcaccgaccttggaggtcgccatgtgttcctgtgaacgatacactgagcttcttggatataccgccgaagagatttaaatgtctcctacacccaactgcggtatccgcctggtggagagcatcatggcgcctgtggcatgaaacaagttggccggctaagggccaacatccgacatcgttaaaatcgttgctgcaggcctcgatttggctctctaaatcgcccgagctacactatgagactagatcgtttcggcgaaggaatctggtggctgtagctgagcctcgtcggagctttagactccacgtagctcgaaagttctcgttcgcgtgtctgctggatatctacgatgctttctgcggctggccaagtaacgaaacctttctttcaaaaacactcgaccctaatgagaatacctgcagcttcgaacagcaacggcgctggcttcgtgggctttataacgaactcacacaaatatttcatcgggttgaaatcgcagtgggtggctctggaatcacgaggtctacagacggattcactccaaatgtgggtgtgaaaaagtctaacaagacaaccttgttcctattccttcaacgttcgaccctaaaactacttttccgccccaaatctcaagaacgtgacgagcatcctatctgtcgtgacttacaaggtacaagtgcctctgatgtcaccaaatttgtccagttttgcaagaaacaacggcaagtactcctacctgtgcaggatgacttgcaaatgcgaattgcatatcggctattgcctgtaaggtctcgattctggtttctagcgcaccaaataccaaatgttcagcagtgcccttactacggctgcgcagcaatcgaaactgcgcaacaccttttcctcgagtgccaccactcaaacgaaatctggaaagccctctagaaggactggagtatctttttcgtaggaggcatcagctggacttccatggtactcccccacaagcaggaaactcggtcaacatggtcccatcacagagaggcagtgctttgcctatgaaatatagtgagatgcgcagcacttcgccgccaatggactgagaggaacaaagtttgtttcgaggatggaggaccggaaccccttgaaacaccgatatcaagcatttacagcacattcagctccaactatcgacgcctcttaagactatcaaactccgaagatcaaaccaagttcaacactctgttacaacggcttcggtattccaaacatttaggcgatttcatcagcagacatgacaacagattcaagcttcggcatgtacaactacacttaacaccccgctctggtgtggtgttccgcactgttgtcgagtaagtagcacattagttcacacaaattgagaagtcagataaatcggtaatcgataacctccaagaggtttggtcctagagacaaatcataccgtaccgccaattgggcttgaagcggttcgggggacacctcatcgatgaagtgcatgcggagcaacttccagtgcttgtatgtgtggcaagaagtccaaagaagtttcagcttgagtgtgaccttctcctttgagcgctcagggtccttcagaaacaactggagctctttaccagtacgaagaaaacaatcgcacgatcagtaacaaattgttatccactcaatacgattactttcgtaccctctacagttgatatgacctcctgtcctgacgtgggctctgtaacccgcgattcaagaagttgacgaagccgcgcgtacggcgtctgacgcccgggcacagcgttaccatctttagtgctctcgtctggtggcgctgagtgtgggatgcgaatcaccacttcggaattgctcgccgtcaccttggcagtgctaccggtgtgcttcccttttccggccatcgcgcaaaatccagaatggcgagctcagcagctggcaagtaacttgccagcttgccgcaagttggacgtgacaactgggcaccttataaatgatgcacaataagaccaagtatgtatggccagttaaacacacatttccactcttctttgtcatctgtaacgacgcggtataataattaagtgtgcactacttgcgtgcaatcttaatctatctttgggcataattgttttcaaagttgacacttcaacggcaagttcaaaaaggtccaacaataccgcccgatgcaatgctatacgctgagtgtaaagcgcgacatagatgtgcggtgcgcacgatctcaaactatctttgtcattttccatttcaaagttgacacttcaatggcaagttcaaaaaggtaaacaaatctggccggggtaaatacctgtatgcgctatagacaaaagggagtacaccggtgcgtacgtgcgctttttttatacaaatgtgaccggatcaaggtatcaaggtatttaaagcttgctaagcataaatgtgtggcttactagataatcgtgagatctccacctatcgctgtctataacagtggttttcgattttcaaagtgttttgactttttagattccccaccatgcgtgacagcggttgccataattcaatccttcatcgtcgctttgggggagggtttgactaaagctacaacaagagtttcgtcggtttcccgaaacatctgcgtataatggttattgtgatgctgggatgtccaagttggaccccaatcagtggtctaagcacttctcaatttgcactcttcagcatctagtgctcccatcgcgactgaagatgttcgttcgccaacgactaagtacccggggctgcattgttctctatcatgctgtttctgatgagatggcggacgagttgagatctgctgcactagaagttcaagacccgaggatcccggagacgtgggatggagttcatgttgacagtgagcgctcacgtgtgttcgtcccgtacggtgatgcggaggtcttgtcggagcttttcgagcgccactaccgaacatttttttcgattgccagcgcagtcgagtggagctatcggaagaccagcagtggatcaagcgaccaaccgcctcgtcgggagttttcgtctcttcccggaagcacggaaacacttaatgtgtgctcgttgcctggaacgttcctccttgctttgcaagaccatacctacgtgactgggttcggctggaacaaccaagtggcgctgcaatcgagccagcgacttatcgagctgaacaaaggagatgtgctgatgcacagcggggacttcgtttttgcaagggccggaagcgccacgaacaatatctgccttcacgggtatcttgatacgccgctctatcccagacccgcgtaccaggacccggagatcgttcccttcatcaacgataccagcgttggtgttgacgacgttttctggaactgtacgttcaaggccagagacccccaggtactgcgcaagcacttgaatcgctaccacaacttctacttcaacatcctccgggctagtttttaactagccagctcagagcatagctctctctctctctctctctctctctctctctttctttctttctttctttctttctttctttctttttgcatacttaatccagttaatacaagtgatattgaatcacaattaatcgcacaagaatttgtctccactacagcctagtataaaatagttcgttatggttggtgcataccacacctcttcattgttcctaatagatgcatttgccaggtttcgctagcatcggtttttctcaccccgcgcacttgcagaaaacttcttagaataatttatgggccggacttcccgcatgtcagatcgaattgggcgagtaagagcaagtcggcctcttcgtagcattctcgcagatgcactcacctagttttgtaagtattagtctctctcacaccgcgcacttgcagagataatttctcttgagtatttacgtgtcggacttgccgcttatcggattgaatagggcgattttcagtgagccaggcaagcgcaagttgtattaataaatgctgcgagttatctccaatctcattgcggctaatgtacgctcactcgatgccatgagccggttttcctcttccaatgcatcgaagggaggttttgcccatcggattatgtcaggtgttaatggactcagtgtggtaaatgccatgcgagacgtaacacgagataccagtagatatggctgctcaggtttgttcgtcactgctgtctttgatcgccactcagtcacaaccagtcgatctagcgtttctccctggactttgtagatcgttgcggatactacacacacgagcgggaactgctgaattcgcacggcaagttcacgtggctttccgtgcagccttcctggtaatggaattttgcactggttgtaagaatgcgattgaaaaaatagcgggaaaagctcggcatcgtcacaacccttcatcggtatcgctaaatcaccacggcttaaccgaacgataaccgctggcggtggtacgctaggtatttgtacaagcatacctgcatcactatcgtgcacaatccgaaacgtcatacccggctcgtaaattattgattctaagtttccgagtgtaccatttgcaaccatcttctggggtctgatgttctgggtaacttggcattccaataactaagtccaaatacggtgacatgcggcctaagtttgagtcaggtaggctcattatcatcctgacttcttggtgattcaaagacgccaattttcctttaaaatcagctaccactcggacaggatagtgttcatttggcaagagcttcgccgttgtcgatatgaacaagttgttaattgccagtcgcgtcgagttatcaggaggaacaaaagtcggaatgtcgtggccccgtactcgctgcgtctgcataacagtccatactacatcagttgagcaaccgtccttacttgctgcagctgttcattttctgcagagtattggtgttgctgggctagaccccagcaacggctacacagtgtagcaccagctacaacacttccccctccaaaagctccttcaatataaagccgtacaacttgcggccagctgcgattcatgacgaggcatgaaactagtccagctgtagcgccttgcgtagcgccttcacaggtggcttcttgccgtgcttgcggacgaaagccttcacggccactggaacgtcctggaagagagtgtccgcagattcccaggaatcctcaatcgtatcgagtgcgcgccagtgcacctttagttcatgtcgtttctcctgacgattgtatcgagcctccagcaaagcgtccaccacgtggccctcgctgttgtgtgcaatatgcagcaacagatcctctgtcacattgagggaggcatcagcataaaatttcagtcgactagcgtgcacctctttcttctgccccgtgatcggattctcgatctcgaatatccagttggacacggttgaaagaacacgagccggcccacaccacttcacgctgagtttgctgcgcgtatgctgccagacgtcggcatacaaaacgaaatcacccagatcaaactgggccatagtagtgccccgcttttggtcgtgccgcttgcgtccggctgctcggacagccgcgttggtgtctttgatgcgcttgtgcatagcgtcgagagcttgttgcagcttcacaacatgcgctctttgtgttgtttgtatctcggcgagagtagtcgttttgataggtccagctactgcaatgtgatcgctaggctccatagctttgagtcccgtcatagcgttcaaaggtgtcacgccccccagcgatggcgacggcgagttgtttagcatcatctgaacaatctttatcaatctcggccattcgtgcggctgcagcctccattcagacaggagagcgcggcaggagcgcagcgcttctcggttcaccacctctacggtgccgtttgcccatgggcacctagcggtggtgaaatggtggtgcgccccaattgcatgttgacgcgcttcgatgaccttgttcttgaaatgtgtaccttggtcactcacccaagaccgacacactccaaacgaggcaaaccagtcgagcatagtagtaaatgtagtttctgcatcagctgcctcactaggcaccagccacacgtacttggacgcgtcgtccttaatcaccaggacgtacgcctggtcggtgtcgctcacccccatgtacaaaaagtcccagtgcaagagctcgtcggggtgctcggcatgcatcgcctcaccaagtaggcgtggttgtggcggaccacctagagtacttgcgaagtgtaggcatcgctgaacaaaaaactccacatcgcgagccatttccttccagacgaacgtctcgctgatatccttcaaagtcaccgcactgcctctgtgtcctgcaatgccaaagtgccctacaacgcacacgcgcacttgtagttctgttgcattgtccggaatccagattcggccctgcttgtccttccaaagagagatcacatcttcacttgagagggcaaaaccccgtggcggatcggctgcactttgcgctgccacaatctcggacaatgttggccacacaaacgcttcatcaagctgaggcgacaacggtagtggcacttgtcgaatagcacagacagtcttaaaggcagaaccccatcttgatagaaggtcggcccacacgttatcgtcaccggcaatatcgtgaatctcgtatttgtatcccatcagcagtagtgaccaccggtggagcttatctgctgtgtactttggcaccgagtccgacacgctgtgcgggtcaaaaatgtaccgtaagttgcggtgatccgtgaacaatgcgaagccatcttggcggtgcagtagatagtctgcatgtctgcacgtctcgacgattgcatatgcttctttctcgacaattgcccaccgctttgcagcaccagagaaggatccgctcaacatcatcaatggttgatgctcctgctcactaagcggtcggttagtatggtcacgaggaatctgcgtgatggcggcgccccaatgttcgtcactcgcgtcggtgtacaccgagagttgtttttcggggtcgggatgcgctaacagcagcgcatgctgcaatgcttccttgccgcggtccaaacaggcaacctcgttgtcaccccaccccacgtcagagagttttatggaccggacttgttgcttcttacggccaccagctcgctcatacactcgctccattgtcttcacgagagggtcaatcaatttattgaaagcgggtaaagaagcccgcatccaatccagtgcacagacgaactgttgtagctcctgcccagtcgaaggggctgaaggcttcgacagtgcatcaattctagcaggatattggcgaacgccctcgccggagaccactcgtccacaccacagggcctctcgcaaataaaatctgcacttcgtcgggttcaacttcaaccccttttcggcgcaaatggtgaggactttcttgagcaaagctagcaacgccatgtcggagtcttcataccccaacaagtcatctatccaaatcatcaatccgttattgattgaacacttccgcaaacatttgctgtaccgttgactgcacgtaagcaacgatgttggtccctcccattagcacgcgagtcggtgtgatcactccttctttcgtgagaatagagtagatctcctggcaaagtagagccatcgcaaattgccagaaccccttgaagaagtctagagaggagtagcgtgacgagcctcggagctgttcaaatgcgacctcgagaacacacaacagactcgacacaggcatttggcccccgcacattcactgtcatgcgatgatcactagcctcgggtttgttcacaacgtggggcggcgagcaccacctgctctgcgggtttcggtagcataaccccgctgcaatcagtgcgtcgatgtgcttcttgagaaatgcacggtgcaccggcaagtagcggcgagctttacacttgaccggaattgccccaggcttcaacttcacctccattggaggcatatcgacgggcgggtcgcgtccgatgatgatacgaaaaacatcggtgagctgcatcaatatagtctccaattctttcacaaattcttccgacgcaccaaatctccgcgcttcatccaccttctccaatagaatagctctaatttcttctctttcggcgtcgatagctttgtcgaaatctgtaacggaccaggtgtgtgtccgttactagcttacacgtagcggtgaggaagcttagttaagactcggatttagtgagaccaagcagtcagtcttgggtaaaatcaactctgttttatgttaggaccagggcggctacccctggtctcatgtgagccactgaaatgcaggtcaacgccggattggctgaaatggggtctggctcctccaattcagccaatcacgatgaccgtcagtacacgctagccgtgtacggacttaactactttatgtactgtcaatctacctagttatgtaactggggcccattacatcacccccctctcaaagttgcgcttacgcaacgtaagcgcaaaagacacatttccgaaagaacacccgaagaacacccgaagaacaccatggacgaccgaggcggcggaggaacggcgctcgcgctaccgagtgacacaggacgacgcaggcgcagcaagtgtgcacacaccaagacgtctcgtcggcgcacacgccgatgcaatgcgcagtgccccaagtggctgcggacatccacggacacccgaagggagggcggacgtggcaacgacgcagcatggggagcgacaccaacgcttgacgacaagcgcaactgtgatgcgcacggagcggagaccggcgagtgtcgagacacaggatggcgatcagcgtggcgtggctcttcgcgacgacccttcgacgtaactcccgacgaagagtcgcgcaaccgtcgacccgaaccgacgtggcagcgagaccagcttggacaccttcgacaccggcgatcatcggtggtgcggcgtagtgggcaagcgctcaccgagctgagctgtgacgcgtgggttcaagccccacgcgaatccctcttgccccttgccacgcgcagtcgctccaagcttgaccaggtcgagagcgtcgtagaggggactcgaagcccagctagcgcagtggtcgaacgctgcgccaccaaggcggaggtcaccggttcgagtccggcggtcgtcgtcggattttcttcttagtcttcgcgatgaacgccaccgcgagcttgcggtggggatccacttccatcatcacgctcacttaaggcttcagcttccgcggggagctccgtggtctcttcagcagcagcgaccttcgcctcatagtcacgaacaacatcggggacatcccgaagaagagctgcacgcgtctcccacgtgtcctcgtcaggtggaaacccaagccagcgtactcggtaacgtcgcgcggctgggatcgcgcgaggagcccggactggattacgcccacgcccgtttgcacgagatgggtcctcgtggtgaacgatgcggtccacaatccagcgcgcttcacccgccgagtcgacaatcggaggagggccatcgcgacggtacaggcttgggtgatgggtgttggcgtcgcgagtagcctcgggtacattacccgccagtgaatcctggtgatcagaggtcggaatatcggtaggatgacatcgcttgaggctcccgacgtagaatgtcgggtgaagacgcagcgacgacgggatgtccagtgtgttcgcgtcgccgacgaccttgatcaccttgaacgggccgatgaagcgcggcgcgagcttgttggcaccgaggttggtcacggcggaggagcggatgccttcggtagacagtagcacacggtcacccgtgcgaaatgaagtcttgttcttgcgtacacgcttgtctgcattctccttctgccggtacattgcggcttgcagtgcgtctcgcacgaaacgtgtgattgcttgacgctgctgcacaaactcggaaaccgccaagtgatccgtgggactcgccgaggacttcggtgcatagttggcggtagtagcaggttgctgcgtcgtcgctggagcgccggcggggtcgatcagagttcgctctgtccagtctgcgagcggcgtcaccgcacgatgcggtgcggcaagggccttcttcgcttgggatcgtgtcactgcatttgcgcttgattcggtcactgggaagcgtggcgacgccagtgaattgaccggcgacggttctgccggcgtcttggccggcggtgagtcttcagaggtagctcctcccccaccaagcgtagagacacgagcctccgtgggttggcctacggcaagcatcgcgggtacgcgcgggtggcgcgcggagttcacgaagaacggagtcatgcccgtcgacgagtgctcggcgttgttcagagcgaactcggtcaggggcatgaaagcgctccagctcgggaacgacgtagcgtagctgcggagtacgtctccgacgacgcggttggcgcgttcggtttgtccatccgtatccgggtgagccgcggtggacatcgccagctgcgtttcaagcaacttcaacagctccgtccaaaacgcggacgtgaacctcggatcccgattcgagacgatggaatcgggcagaccatgaaggcggaagacggcgtcgacgaagtgggctgcggacccttccgcagtaaccgtggcagccacgggaacgaaatgcaccgtcttgctgaacctgtcgacgaaaacgaggactcccgtgcgcccgttcgagtcgggtggaagaccgaagacgaagtccatcgagacggagcgccaggcttccgtggggaccggaagggggcgcagcggagcctgcgacgacggcgagggctttactcgctggcagatctcgcaagtgcgcacccacttgcgcacccacttgtacaagtggggccagaagaagtctcgcgccaccgccgcgaaggtcttttcgcgtcccaagtggtactcatactcaagtggtactcatggatgatccgggcgcgaaggtcttcgtcattcgacaccaccactctcggggcatcgaatcggtcgatggtgtacgtcagcagggagccatcaagcagatatcgctcgacgtggctgcgggtcgagcgcgacagagccttcaatgtcgtctcgcttggagagcggaggtgggccaggatgctggcgtactgtgcgtcacgctcgtacgctgcggcgatctcgtcccgaagcggcatcttgggggcgacgctcgtcaggttcaaccccgacgtcacacacgtcgcacacgcgtcttcaccatcttcgtcagctgcctggcgctcgaggccttcacgtgagtcgtagtctggacgccgagacagctcgtcggcgaggatattgttcttgccagacttgtagtgcaccacgaagttgtactcaagacagccagcggaccatgcgcggggacagatgcggggatttcatcgcagtccgcagcgatgcatggtcggtgtagaccgcaaacgtctgctctccgagcaggtagaccctgaacttgaccaatgcgtagcgcatggcgaggagctccttgtcgtgcactgggtagatcctctccgccggcttgagctggcgggactagtagctgatcacccgctcacgaccctcgtcgtcgaactgcatcagggcacacccgatggcaaagtcgctcgcgtcgcagacggcgtggaatggcttcgaatcgtccgcgagcatcaaaacaggggcggatgacagactcctcttcaccgagtcaaatgcggcttggtgctcttctcgccacgaccacgtgatgtccttcttcagcagcgacgacagtggctggattaacttcgcgtagtccttggtgttcttgtgcaagtagttcgccatgcccagccactgacgaagctcagtgggactcgtgggggccggctaagagcagattgactcaaccttctcagggtcggcgcggactccatccttgctcacgtagcagcccaacaccgggatctccggtgcacagaacacgcacttcttcaagttggcgtagagcttgttctccctcatcacctggaagacttgccgcaggtggttcaggtgtacttcgacagcgccgaggtcatcttcggcgcgacagtgcacgaagatatcatcgaagtagctcggtgcgaagtcacggagcgggcgcagcacatgggagaccatgcggttaaacgtggccggcgcgttcttcagactttggggcatccccagccactcccagagcatgccgctcggagtgcttaccgctgtgagaggtatgtcacactctcgcatgagtatctggtagaacccatcggtcagatcgatggcgctgtagatcacgcttcccgccatagagtccagcgccatgtccttgcgcggaattggcgtctgcgcgggtatggtggcatcgttcaacctgttgaacgcgtgaacaatgcgccacccgcccgttgccttcttgacgcaaaaggtcgggctggagtgtggcgagatgctttcgcgcacgtggcctgcccggcggcggctctcgaagaagtcgtcgatggccttcacctggtcacgtggaagtggccactgctgcgtcacgcagtacctcattgcaggcgcgaggtcgatctcgtggcggacgcctcggttcgccgggagctcagcggggatcttgtcaaggaagatgtccgcgtactcgcgggcggtttcgtacacggggttaccggactcacgcagagcttcccaggactgcgccgcgaagcgctcctcgcgcgctgacttgggctcggcgtgcttgggcctcgacggcgcatcctcgaccttgaccgcgctcagcgtatccaccgggaccgcctcggtgatcagacacacttgctcgatctcgcctgccttcaggtctcgaagaaagttcttccaggagagtcctgggagacgcgtgattgggtcgaagcggactcgcgacttcgatgacgcgcgatcgtcgtggagcgccctccacgtactcgagagcgcacaccgactccttcggtgggttctcagtcgctgacggttctcgacggggcttcaggcggcgtcgcttggacttcttccttcgcttcgagcgggtgctcgaagaagacgcatcgctctcgctcgacgatgattcaccctcctctaggtgtgagaggccacgctcgatcacaccgtcggtacgcgactacagcacgctctcagccgcaacatcgttgtgcgggagcgactcatgctcgaccgcctgctcaacttgtgacgggaatccacgctcgaccgccgtctcagtgggcgacgggaacccacgctcgaccgccgtctcattgggcgacgggaacccacgctcgaccgccgacttgtagctcgacgggatcccatgctcgaccgccgacttgtagctcgacgggaacccatgctcgaccgccgacttgttctcactgtgtgggagcgcacgtcgctcgaccacgggtccgtcatcgcgtccacgcgatgtcatccggacatcatcatcatccaacagcacggcacatgccatgcagagagggccatcgctcgctctgtgcacaacttgcgtcgtggctgtcttgtccacgacggtaacgtgaggccagtctcttggagccaccaagagatgcgtgaacacttcacgtacgtcgaagccacgtcgacgcttgactgaccgagccagctagtcaatctctggctgattccgtgcaagccacgggatccctagaatgcagtcgaacgcgtaattcatctcgatcaccaggaagtcgtcgttgctgcggaagccgtcgaacgtgtacggcagggacacctcgcgtcgcgcgacgcggtgggccttgccatccgcaagcttgacttccacctcgcccggacccttccggacgcggacgctcgcaggaagcaccgacagacacgacgcgcggaagaagttgtttgtcgctcctgagtcgaggagcgcgcgcagtggacgtcgggcgccggcgacatggaggctgacgatggtcagcctcgagtcgccactcgcagtggtggcagtaaaacgtgcatatagcacgggagggctagaaggccgggttgccaccggaggacccggaccttccttccaaccagtagggcgccccgcacctactggcctcggccgttttttggttgggcggccgggctagcgtcggcatcgacgtgcgcgagaactggggctggcgcgcggcactctgctgcgcgatgtccaatcttccggcagcggaagcaagttagaggacgagcgctccgacctcctcccccaccataagccgagcgccgtcgatcacccgacgcctcaattgcgtcgatctccatgggctcgggcgcggatacccgagagacgtccggcatagcgcgcgcgtacgatgccgccaccacgtagtcctcgcggagcgcgagggcgaatgcctcttcgagcgaggagggttcggctctcgtgagacagtaccgcgtcattccttcgcgcatcccaaacacaaagacatgcacctgaaatgccatgtcaatggggtgggtgacaatgcacgacgcaaggtgtcgtgtttctggacgtagtcgcgcatggacatcttgccttgcttgagagagaagaactccgcgcgaacgcgcgactcgtcttgggcggctcgaacgcgagccggagatcactccggagcgacgccagagtagggaacgcgttctggtcgacgacgagcttgccgagggcccactccttggccttcccggacaaccgggagagtaggaagttgaccttggccgccgacgcttcgattatgcgcgaggcgatagcgatgtcgatctcacggaaccagcggttcagtagaagccgatcgtcacccatgccagagtaggtggacgtctccagtttgacgacatcgttcctggaggggcgcgagggagttgtgacccgccgattcgcgtcggcgcgctcgcgttccatgaattcttcggcagcttggcgctgttgttccagcatcgctgagctcagcagcgaagtgacaacacaccgccgcgaggcgatggagagcttcccactcaatgcgcgtgagatgggggaaggcaccgtgctccagggttgcccctgaaggtccggacgtcaggacttggctcatcttggtcttggtcgttggaaggactacgaagtactaccaggtgtaacgggccaggtgtgtgtccgttactagcttacacgtagcggtgaggaagcttagttaagactcggatttagtgagaccaagcagtcagtcttgggtaaaatcaactctgttttatgttaggaccagggcggctacccctggtctcatgtgagccactgaaatgcaggtcaacgccggattggctgaaatggggtctggctcctccaattcagccaatcacgatgaccgtcagtacacgctagccgtgtacggacttaactactttatgtactgtcaatctacctagttatgtaactggggcccattacaaaatcaggaaagcatgcacgagcttcatcgtcttcaagtgcacgctcctccttagtcgctgccggacacaccgctgctcctgtatacgcgagaacactcgctactccactagccgggcgatcgtcgacatcgctcatatcccactccgcactcacttgctgtgcagaagcaagcagcttttcaaggctgtagcccaatcgctccataatccatcgcgagagcaataggtcaccaacaccaggcggtagccggtgctccgtgacccaacagatcacgttgtggagctctaaagggccccctggagtcgaatacctgagatcgagcttcactttgctcttgacaggcagaggtttatccccaacaccagtgatggccgctccaccgtcaatatcctgcttgttgagccagacccccttcgctgtcaacagcttcagtgattttgcagtcaccattgacacctcggcggcactgtcgggggtgatttccgtctcaacgttgtccattacaacacacggaatggctaaagtcgatgtagccaccttagaatccgacgccgtcacggctaatacaggtttcagcgtctttttcccagttcttgcctcgtagagctcctttgcttcggatggactcgcaatggcaggacactggaacacgccatgcgtctggtcaccgcatttgaagcacttcttcggcggacgatcaccggtcggtcttggcttggccttgttggtcaccttgtgctggtgtcggtcgtcagtgctgtttaccttggtagcaccgtgcgtcccgccaaatcctcgttttgactgatgctgctgctgagtcggcttggtccctcctttggcttgagtctgggctgaaatgtgggcctcgaatcgcataaacccctatagttcacctttcagccacttcaggaccgctgccagatccgacttagtagacttgtgacactgccggctcaattggtctttcactgctgccttaaccccttggttcccgacgtcgtaagttacgactttgccgaatctcaatgtcgtataatacgacatagctcgattaacaatagcatttggctcgaaacgagattgcaatactttaatcaagtctattttcgtcggcaaaagtataagcaagagaggtaaaaaatcagaattgcacaaaaacacggatatagagctgtcatcagagatgggttgtgcataagccggggctggctaatgaggcattttgtatagagaaagacgagcatccccttttaaggtttgcgcgagtacccactttcaagcaaacacaacagcgaccttgaaggggagagtacggcgtatgcggctgtcaagagctcccacgagcttgtagaatagcttctaaacgcccgtacaagtaaatgataaaaaccatggatggaatggtgtctaaatagctctccaagggctgttgcagctatttcctcgagtttaggtgccgaatatacaaagtaagtataaccggaagtagactatgtctgccgagacttctaacacgaagaaatagttatttgcagccttataacaactgtacggtgttggcagcgacaatgttgcagcgtatttcgcgccacgtaaatgccggattgaaacaagggcatggagtagtgcgtaaataaccttgatcgggcgtatatcccacaatgacctctcccaataactaaactaagatgacgagagtatcctactactaaccaacttaagcacgacgtatacttcggtatcgccgggaacgacggaggtctggctcgtacgcgtgtcatcaactagtcaatccgaccataatgccttatttgtgcgtatagagatcctcttcggctgctttgacagtctccgtgtacgaggcaatttctatagtacgcgaagcccgagtgtcgctaccggtgcggccacagtatcaatatacctgctgcgaattagaataactgtggtaggcttaaactttttctaggaacggtaaaacgaagcaatttcggcattgcttcagtgttccggattgagaaaagccggtggtgtaggccgttgcctcggcaacaacactctatagaaatgggcgagttgttgggcagatatcgtaaagctgacaaacaaagcgaagaagtgaagctgctgctacggttatagagctgctttagcactgacatacaaagtaagtcagcactccaagtacccctttgttggttgtagcgattacccatttttcttgaatgggatacggttccccattacctgacctgtgcataagtgagagggaaaatgttctgattggctatatattgatgatttggtgattacaacctcgcagtcatctatcaacaccgcgaaagatggatgttttgtgtagttcaccaatcctattgatccaccatctggtattagtatgcactcatctacgttcaatgtcgtaagttccagcgtacttcacgtcgttttcgactcttatgtcgtaagttcccccatagatctctacaatcttatatgtctcatggggcttctcttgttacggacgggcgcgccaatacaaactcgtagttacttttttcgtcgtaagttacgacatacagtaccgtagattacgtgtttcggtgcctaaatcccgggaaccaaggggttaaaaggctgcggccttaatgcgtccactaaatatccgacgaccttcttgggctcagtgtgcacgacatcctccatgttgagtcggtcaataatctcgtaaaactgagccatgagtcgtgagagtcgtgactccgcatgcagcggggctgccgtagctgtgcgtcagaggaagcttaacagacagagtctcagcttaagatagcccgttctaataccagaacgtacgagtccgtacacctaacggactccaagagtcaacccttaactcttaactgtgtgaatctcaaactgaatgtatttccctttattgcggcaaagccgcctacaatgtaaatgtatccggttcactaactggcatagtgaaccctagtcatatgcataatcagtggctctgaagccatgtactgattatcctacttatttaggttagagagtgtgtacccacttcgtaacccttcgggaaactctcgtgtaaccccgttacaccctcccccaccaaaccgtggacacgggtgttcacgtttaacggtcaaccaccgggtcttgttccgtcaagcctcctactcgaacgagtcaatccacatcgcgtggacttctctgagaacttctcggcgcaacgcgccctcacatgacttcaagtgataaagccttttggtctttcgaccgcagacagcctctcgcgagatccgcctcggagcctcgctcctctcgtgctgctgtactacgtgcctccgcacctccgcgaacgccagcgcccgcgcgcacaccctcgacgccttccaggctctcggtgtccgagtacttcgcggcgcaacgcctgaagcgcagctcgcagcgcgcaagccccagctctcctcgagcaccaacccgtcagatcatggatcttagggaactctttggtgaagagggcgaggtggacgagtccatggagggttctccgaaccgaggagatgcatccccactcacgcgacgctccccgagccgcggcgacgcttcaaccacaccgtcgacacgccgtgaagaaggctcgccagccccagttggctctccgagccgtcgcgatcaagggcgccacgcgcacacgtctcctgtgctcgccgagccgtccacctgcagagcgcgctgcgccgtcgagggaggagccgcgaccaccgctgcgatctccgaatccgttccctgaacgctcttccggcctctacgagctgcgcgcgctcactgagccacggtattcgccacctcgtggtgagggcgtgcccctgggcaccgtcatctccaaccctttggacgaagctcagtccgagcaggttgcggcgcagatggctcccaggcgctcccagcgccccgagctgcggcctctgctgaaccccagcactgccgacgacggcttccggcctcgcgaccccgcggaggcctgtcgccaggcgttccagcagtctctcgcgctacacaccattgggcccgcggcccgtactccggaggagctcgcactgcgtacgtctctgcgagagcggctcctcactccacagtctacgactgtcgcggagtatcgcgagagggctgcggctgcaagcccagcagaagtccgtgcccgacgtacccggtggtacttagcccaggggaagactcaattgagtacgaagctcagttcgagtcttgggccgagcacagccgaaagctcagatccatggacgctctccgagccagcttcagtgaagtggatgttcgcattgaacgcaagctccgcttcgacttcgcgaaagtccgagccaagcgcagcctctcggcactcgcccagccgcaggcccagtttcgcgctgcgcgcttcgctccttcgagcactccagccgctccttcccgcgagggagtgagcgctgtggctcagggtcagccttggagcaatgtggctgacccagtagctccccagcttattgccgggaagcgcgggacggccggcgtgccggccttgagccctcggggcgctggtgatcaagctgatcaaaagcggccacgacgtctaggcagtcttggcggaggggcacctcaaactcccatgagttctcggagtgagggtaccctcaccatttcaccagatactggttttgaccccggcaccgccgcttcgccaggaggcgctccatatggtaatgcagatccccatgctcatcgagcagggccggtggaggccgctgtggggtcctttgcgactcaaagtgagctcttggaggtgcggcaacaggcgggtcgccttcggggtcatatccatgacgtcgatgcacgtctggtccggactgccactgaactcgacgtgctggccgagcggacgcggtggatcgaggtgccacgagcggtctgggaccgccttggggccctggaggactgggtgcgatactatcgcgatcgcgatgagcaacgtggccgggagctcggggagctacagcgtcggcaggctgtgcttcagggtcagctcgacctcttggcccgcatgcaggctccgaccgccgcgcctcctgcgcctgcggctcccgctatgcccgcggcacctccggagccgattcttccgcctgtgcctgcggtgcccacgtggtcgcgtcctcgacgtctgcgactgcgtcctcgacgaccgcgacctccgcgcctgtgacctcgtcactctcggtgcctccatctgcacctgcgtcgggtcctggtatggcttgagcaagcccacgtagaagacggggtgcgtccgcatcttcttcggaagattgagcgtgtacgcaaggcccttcttggccacaaccttgaaaggtccgatgaagcgcgggcgcaacttcgtcttgaagacggcagacactgcatgtgtaggtaggttcttagcattaagcaacaccaggtccccgacctcataactttcaacattgcctctgcccctggcatctgcatgttccttttgcttgtcttggctctcagccattgcgtcacgcatagtcgtaagacactcagacgcgtcgacaagaaagcgtcaacctgtttacgaacagtagccgggctgacatcggctagccgatcagctaaatcggattctcctcccccaccaagcccgaggccaccacgtggcggcgtcagcgggacgcggggatgagacaagctgttcacgtagaacggcgtgtagcctgtcgatgcgtgcacggcgttgttcaacgcaaactcaacgagtggtagcatggcgctccagcgcttcggcgtctcagcgcaaatgctgcggagcacgtcctcgacgacgcgattcacgcgctctgtctgaccatcggtctgcgggtggtccgccgtggacatgtccaacttggtgccaagcaccgcaaagaccgcgctccagaagtggcccgtgaagcgggggtctcggtccgaaacaatcgactcagggagtctgtgttgtcgaaacactcggtccaagaacagcgttgctgtacctttaccatcgatggtatccgccacagccgcaatatgatccatcttgctcagtcagtccacgaagaccacgactcctgcgttgcccgccgcgtccgccggcagtccaaatacaaagtccatactcatggattgccagcagctcgaagggacaggcaaactcgccaacggcgctgcagcatgaggtgacgacttcactcgctgacacgcctcgcacgtgcgcacataagtgctcgtccacttgtacatcttcggtgggtgctcaccgagctgtaggtcttctcacggccaagatggccggcctgcggcgtgtcgtgtgcctcatagaggatgcgatacttcagatcctcatcatgagggatgaccacgcggggcgtatcctcggggccggtgttgtagaacaacagacctccatcgagggaataacggtgtagccgcgctgacaattccatgtccgagtcttgaaactccttgccccccagagccttcagcaacgcgacacaagtgtcgtccttggcataagccgttcggatcagatccggtaatgacgaagtcacggtcgttacatgagccagctcataatccggcctgcgcgacagcgcgtccgcaaggacattctgcctaccaggcttgtacttcacctcgaagttgtactacgcgaagaaggacagccaacgggccatcctttgcgagaggtgaggcgactgagtcgcagtgcgtaacgacgcatgatccgtgtaaatcacgaacggctgagagcccaataggtgcaccctgaacttgacgagcgcatacttcatcgcaagtagctctttgtgatggacaggatagtttttctccgcagccttcagctggcgagattcgaacgccaccacgcgctcgcgcccctcggtgtctgcttgcagcagtgcacagccgatggcaaagtccgaggcgtcacagacgacactaaacggacgagcggggtctgacaaagccataataggcgcatgaaggagactgtccttaattgccgcaaatgcatcttgatgctcggtttcccaacaccactccgcatccttcttcaggagattggagagtggccgagccatctcagcgtagttctcgctgtacttgtgcaagtaattggccaagccaagccacttgcgaagatccttctggttcttgggaaccggccagtcaacaatggccttgaccttgaccgggtcggccctcaggccacgcttcccgatgaagcaccctaagaaggggatctcttccgctccgaagatgcatatgtgaatgttggcgtacaacttgttttgacgcatgcatacgagcacagcacgcaggtgctccacatgattctccatatcagtctttccgtgctccgcacgactgtggacaaagatgtcatcgaagtacgtttgcgcgtacacccgatggggcctgaagagctgcgtcacaagacgattaaacgtcgctggcgcgttcgaaagcccttggggcatctccaaccactcccagagcatgccgctcggagtactcaccgcagtgagaggaatgtcgctcgtcctcatgagcaattggtaatatccatcgaccaagtcgagcgcactgtacatcgtacatcctgtcatgttgttctgaagaacatccttccgaggaatcggcgtctgcgccggaatggtagcggcatttagcttgttgaaagcatgcacgatacgccacttgccattcggctttctgacacagaacgtcggcgtagagtgtggagacttactctcacgcaccatgcccacctcgtgcttcgcacggaagaacgcgtcaatgacgtcacactgctccttcggcaagggccactgcctcgtcacgcagtacttcgttcccggaacgagatcgatttcgtgtcgaacacctcgatccggaggtagccccgagggcggctccttcgagaccacgtcctggtaatcctttaccacttgatacaagggatccgacgggtccttcaggatcgccgatccgctccgcgcattcagcgccttcttggtgtcttccaggacagcttcatccagaagcgaggacgagttcaactcttcttcgggtcgtatgaccactacctcagccaagtctccagccttcaaggcttcgccgaactcggccaaggacatctcgtccagctccaggagagcagacagtgagggcaagtcgtcgaggttgatacctccgtcgacgtcgcccgtcgctccattcacgagtgtatagagctgctcgctctcgcgtggagcctcaccgctcaacacgcccttctcgactcgtgagatcgcagacgccttgcgctttgcggcgctgcctcctcttcatggacaccgttcgccctgaagatctcggtgatttcgcgtgcgtcttgacgccaggtgtcaccacctcgtgcagctccaggggagctccagtgtctttaccgaccctcagcgaagaactgcacgatccgcagcctccactcagtggattacgtgccactccacgatcttcatccgggcaaagccccttgttcttcggcatcgtgccgaccgcgtcgttgctggcacgcagcagggtgtcgccctcagacgcacgcccgctcagcggaattagtgccgctccacatccttgatccgggcaacgcccatcttcactcgacttcgtgtcgactgcgccttcaccggcacgcagcagggcgtcgccctcagacgcacgcccgctcagcggaattagtgccgctccacatccttcaacagccgggccgcgcccatggctcctcggcttcatgccgaccttgtctttacttgaatacagcggggcgtcgccctcaggcgcacacccgctcagcggaattcgtgccgctccacctgccgtccgcgagccacgctcggaacgctcgttctcgacacactcagtgtccaccaactcggaaactccgatgtccagcacattgaccgactcggtccagtgctcgcgccaaaagcgcttctgcttcctggtagaggtgggttcatgactcgccaatgctccgccaggagagaagtgcgtagcaccaagggctttgacctccaatcgatccaaggctcgtggcgttccagccacgccataccaaggatgagatcatatctcgaatcgaggtctaagaccagacagcgttccacgctatcaaaatccaaaaacttcacgcccaggtccacagggaccttaggcggagcaaacactcgggacaattgctgtttcagctggtcccacgtcgggaaggccacctcgaccgacgtcccggacgttagcgcccactctctcgctcgcccaccgagcttcgagatagctagtgtcacgcgctgcgactccgtccggagtagagctgagctcatagccatctcaacctcacgggtccaaagcatcaagctttcaccctccttgccttcgaaggtcttcacgctcaacatgagcggcttgggtcttgttcccgcgtcgaatgacgaagcgggcgcttggggcgccgcggccatcgccatcctctgctggaggtgctctaggagagcattctcgtagcttgaaaacgcctcgagacgcgcgttcaccgcgtcggggccttgctgcgcaagttgcgtcacgccctccgggcccagcaaggacataagctttttaagcgcatcctgctggttcgggggtaagtgagcgaactgctccattctccacagagggtcagtctatacagactcaggtgtcggattgactacaagtgctaccaagtgcagcggggctgccgtagctttgcgtcagaggaagcttaacagactcacagagtctcagcttaagatagcccgttctaataccagaacgtacgagtccgtacacctaacggactccaagagtcaacccttaactcttaactgtgtgaatctcaaactgaatgtatttccctttattgcggcaaagccgcctacgatgtaaatgtatccggttcactaactggcatagtgaaccctagtcatatgcataatcagtggctctgaagccatgtactgattatcctacttatttaggttagagagtgtgtacccacttcgtaacccttcgggaaactctcgtgtaaccccgttacaccgcatcttgcagctcaatgtccatgcaaagagctttgacttctctatcaagtgtattatacgctgtgttatctggtacaggcgccgacaaaaagtagtatctctactcggcttcggtgacgtccttctcctccttgaagagttcgaaaccgcaatacgaaccatcgtgccttgctcgatgcaagcactgagtggcatcacaaaaaacttcgcctgcgttccttggttcaaggccttgatgcgccttgtgtagatcgcatagctgtccatgaagtccctcttttcttttttggagcttcctctgtatatcggcgggactggcaggttcgttcctgctgccacagtgacagcagcagcttccggtggtcgttcagtacttgacggcgctgcaccttgcgcgaacgctccccaccgagcctgcaaatgcggctgcacagcctctgcaaggctctcaagcctttgtgattgaagtccaaccgcctcttccgccgccctcagcaccttatactgttcctccaggtagtggcggtgttcgtccatttgacggcgcatctcctgctgctgctcaattagggccgactgtcggtcattttgggcttgcaggtatgctgacgtttgctctgcaagtcggtcttgctggagctgcacctggccaatctgctcggcattgctttgatgcgctgcagctgcatgctggaccagggcttctacttgacgccgcgtctcactcccttgaattactgccgttcttgtagtcgtctcctgcgtcagtcgtaggtcgtgctctgttagcggcggcagtggagggtagacagcaatgggcatcccgtcggtggggactggcaccatcgcttcgtcaggttcttccatgctgggctgcgacttgtccagctaaagaattctttgttgtgtcgcttccaaaggaaatgtagaagtgatatgtattgagcagttccttagtttgcactagctgctcttgtcatatgagctgcttgcttgtggtccaacaacaaaatatagtagaagctgctaatacactgttccaatgaaatggtccgcttctacagctgctattagattgctcaaatgaaatggtccacttctagcaatgggtacggtacagacccatctacctaacgtcaattttgccgtagtggtgggcttgtccaagcttttcacgagcttgtccaagcttttggtttcgccagtgtcctcgcttcacgcggattggttgctgaggttcaacttagcggtgataggcggaatcttgtgacctggatgcggattggcgggactgttcgaatcttggcgccaaaacgatcatatccaagctggaccgccgcgccgccgccgcgcgcgcggacccaatcctcattcccaaattggccagctccagcgcaccgctccccaccccacatcgacccaacgctaccagccgcggcgctgaccacagcacagtcgctatgctgccggccacgacgctcatggccaagacggtgacggacgccacgttgctgaccagctgctagtcgaaccaaacgctacccgcctcatgctgtcggccacactgcagcagggctcgaggccgcccgccgcgacgctgcccaccacgacgctcatggccaagacggtgacggatgccacgtcgctgaccaactgctagtcgaaccaaacgctacccacctcatgctgccggccacgacgctgcagggatcgataccgcccgctacaacgctgccgaccacgatgttgcagggctcgaggccgcccgccacgaggatgccggccacaattctgctggccacgatgcttgagggctcgatgtcacccgccttgacgctgtcggctgagatatggcagggcgcaatactacccgccacaaaaggatgctgtgggctcgatgccgcccgccacacttgttttcgtgaaaaatggtatccaaaaacgcgaagtggggcaccaagcttgttctgttgcgctttcgacactcatcaaacggtataagtgagctctcatacggttcatcgaattttaaaaaatcacgtaaaacaactcttgagaagttgcagtatgtggggcaagtgcacgttcaaagaagccttggtggtggttgaaacatgcttgtgggcgtgcgcatttcctacatgaatcacatttcaaaaacatgcagatgataggggttttcaccacgtcattttgaaaaaaaagcggtacccctaaaagattaatagaaatttacgtaacaaaagacggtatacgttatttcggccaggtgatttcattaatcggcgctttcaaaaacctctactaatttaaaaacaggttgcataattaacagagcatcgtgcatagtttcagtccgctctgggggtaccccatatacacacaatcctatcgatacacaatgcactgcagtacatgtatatagaacagaaatttaaacttcatgaagtacgtctcctccaactgtggaagcctagcgtcctattgcattagtcgggaggtacaacgactgtcgacacagcctttatgcggtagcctcaaaaactgtagctatcctaatatcagtagctcctcttaacttctacgtttgtattgccgaaatcgtaatactatactaatttgagtagacccaattataataacggtacatggtacccagaacctccagcaaaagcatgtggtacacacgacaaatacatgtggtacacacaggggcctctagaataggtacctagcacatcccattttgatcccggtatacaaaacttagcacaaagtgtgactgaaaggcttcagcgcactaaaaaaaagaggggttaccccacttagcccagtccgtaggacaaatggaaggaccaaaagttaggcgcctcgctccgtataactagaaacaaataggatcatgtgactacatgggcacaatcccccgtcctagctgtcttggtggtcttatcggtttagcgtcctccattgtccttcacgagatataagccgttgaaaacttgtctcttgtaacatcgaattttgccgatttgtcctagcctaggacaattttgacttgatttcagtatggtctcagctggagctatctttagcgccgatttccctgccccatgcgccttataagacacacctttggggggtcaaaaacactccatacaaatatcaagtcattttggtcctttttcgggctccctaggacaaaaacggccggtgtgtgccacaccaaaacacgatttggtcctatctcctaggacaaatctaagtggtcgtctgaaatatatatctgatattactgggatagcagtggtcgataggtcatgctgcaaggcagcccattcgaacatcggtaactgaagccggtaaactgaggccggtatcgtggtcccttgtcactggctgtttttctatcggtgacccggtaactggagccggtaactgagcccgatctcgagtcgctcactttctgtctacttgacatcgggtttcgacagtgcatgacttcagccattttatagtctaaactaaccggcctgcttaacccctacgtacccacccgcctgcgttgactccggcgagttgcaatgattgcccaatacaaccaccaaggtccataaactaacatgatcgcgcgtttccggcatcattctattgtgccatttcacatcctaccactaaactaagcaaccagcccacgatcgtaccccatctgcctgcccctccagcgtgcacgcgagcaacaacgattaccggattgtcaccaccatggccacggcactaaggctcgcgagattgcgcgttggattttggtgtgtagagtgagtagtgaggggttaacgggggaggcgaggcatgcggacagatagcgtggcagcgttgcgtcggtctgaggcagcgtggtgtttgtggtgcgtgcgtggcagcgtttgtgtttgggtagagcgcgtaggttgttgtcctggggatgtagctcaaatggtagagcgctcgcttagcatgcgagaggtacagggatcgataccctgcttctccactgtgatcaatgttactgtgataaaatcagttggcatcagcactctcccatatgtgcacttcgcggttcttctgcgagacccgctgaccttgagtaacacttttgcacgtttgagcgcttttcgctcagcttctggcaccccgcttttgactgccgtcttgcttgtctgtgcgtgttcggttgctcgcgttgtttgtgcgagtttcggtcccttcgcttcgcctcatcggccggttgtggcggggtttaattcgccttcggtgttccgtgttgccagcacggtgcgtgcagctcgagcttgggcatctgttgaaagcgtggcggtcgctcgaggctctggcgctcgcgacggtcggggtgcggcgcagtgcggtgagtctgtctgcatcgggttggtgtggtgcagattgcgcgttggattttggtgtgtgcagatcaggtgcaggatttgtaggacaattcttccagcgttatcgaggcttctcaatgtcccgccaatcgaccagctaacgttttcagtggcgtgagttggaaaacatcagtgtgaagctgatagtaatctatttctatcttcagtgaagattcgtcacgagcacttgcaaaaaacgttaatgggcatttcaatgcttaaaagcagtcccccgcttttattacttgtacttcctacaagtattcctctctccgactccttcttgcgcatgaaagagcgtcgagctacagccctacaatcttggtatcatcagacacaggcaagatcaccgtctgcatcgagtgtgccggcagcgacagcgtgaacgtcttcgagtccgtctgcttcacactcaccgtcacagccgagctatctcggttcatgaactggatcaccacgcggttgtccggagtcacgaacgcgcagcggtggaagctactcagcgtcttcgtcttggggaactcaatgcgcttggagccagcaggaatgaacttggagaagtgacccatgatgtagaatatcggctgtttgtagaactcggccccgttcgtctcgtccaccagaatgggggcgtcgacgtagttctccgcccaattcggtccgcccgtcgtgtcaagcgcgaggttccagtcggtccagccggcgacgtaattgttcaggtcttcgatgatatcgtggccgtagttctctgcacgggaccagctcttgtccgagtccgtaagagaaactccagagcccgtgcccagccaactcggtagatagccctcacatgcttctgtcgcgagcatgaagatgtctggatagtcctcgtagaacgagagcagcttgtcgaagtctccacccaggctgaagaagaagaagtccaagtcgcgataccagtgcacaccaagaccgctgatgtacttcagcgcatctgcatcttcgaacggcgcaaggcgatccaagatgccggacttctggtcatctccagcgatgatcttcaggtcggggtggttcttcgccatcatcggacccaagtccagcttcacgaagtcgcgttcctggctagttgtcaggcgcagcgactgccattcggatgtctggaggatcgagctggagggctcgttctgtacagtcatggcccaaaagtcgataccttcctcagagtacgcatcgaagaacttggagtaatacagagctagcgcctcccaatactcctcacccgggctgcccttcaatgagcagttaatagtcgtgttcttcgtcgtcatccacgcggggggagcccacgaagaggcgaatagtttgatgtcacgtgacgacgtgttcagagcgcgctgaatgaggtcgatcttgtgcgaagacgacgacttgtccaccgcgatcgagaagtgctccatctcgaagtcgtccaccacgtcattgtacgagtagatgctcgtggagaagtccgtggacccgatcggcacgcgacccagactgttctgcagacccgtctccgagtagtattgatccagcaccatttgctgcagcgtcgacgataacttgtaaacgttgatagctgccgcgtccgtgaagctgccaccgaagccgatcatggtctggtattgcttcgacacgtcgatggagtacgtggggctgctcaccgccgtcgagtcgacgttgacgaccttgtaggcgaagcggtcgccggccttggaggtggtgtagacgccgacttggccggtgtcggggctggtgtagttgttggaaacggtgtcacattcgagttcgttgcagacgcatactcccttcaggttggtctggtagcgcgtggaccagttgttacagctagcggcgacttgctgcgaggtgagcaacaggctggccaatgtggttagcagatgcggcaccatcatggttgagtggcgatgcttggggtgactcaagtgacgaccggtgtttttgaaagtgagagcattggagtggaggcgaggaggatcttgagtgctcggtagttgcagccgtagtagcttttaaagggggctaaagcatacagagtggtggtggtcatcatgaagtggttgctgctgtttattagaaggcataattgatgacgagggctgatcccaggtcatgttgcagagcagacacaggtagtatgcccagcagacacactacatgtacatgtagttgatggcggaaaattgcgtctgtgactaaacatcgatcatacttacctccgcagaccgtcggtcctgatcagacagacagagaacgttcgatgactatttgatgacgtggattaatccttatgaatgtttctccatacagaacatgtattcaagaatgccatcaccctagcttaccaacaccaggctttaccgcagctacttgttgaaaacaacagtttggatggacgtcgggcggatcaccacctgcaccagcttcccgcttggagccatgatcttcacggtctcttcgtcgtcgcccttgttgaagaggatggcaacgtacttgccctcgggcgtcagaaacgctgtccagtccacatcgctgagccgcgactggctgccactggctgctgtgaatttcagccgcacggacccagacgtcaggaacttggagaagtggcccatgacgtagtacatgggctgcttgtagatctcgttgccgttagtctcgtccacgatgatcggcgcatcgacgtagttcttggcccagttgggtccgccgttcgtgtccagcacgaggttccagtcggtccagccggacacgtagctggtgaggtcgttgatgatgtccttggcgtagttgtgggctcgccaccagccaatgttgaagtcaccaagcttcacgccagcacccgtgctcgtgaccacccagtcggggatgtagccttcacaagcctccgttcccagcatgaagacgttgggatacttggtgtggaaggtagtgagatcgctgaagctgccgccgatacccagtgggaagtcggcgttggagtaccagtggataccaacgccgtccacgtactgagcggcgtccgcgtcttcaagtgcagccagccaactgagcaagttgctcttgttatcgtccatgatgataagcttcaagttggggtgatcggccttcaactgtgggcccaggtcctttttgatgaagtcgcgctcagtcgtggccgtaaagcgcagactctgccacgaattgagcttgataaggggctctgacggctcgttctgcgtggtcatggcccagatcggaatgccctccttttcgtacgcagtgatgaatttggagtagtagagcgccagcgccttccagtactgttcacctggactccccttcatgtggcagttgagagtcgtgttctccttcgtcatccagaccggaggcgcccacgaggacgcaaagatcgagaggctgcgctcggtcatgcccagcacgcggtggatcaggtccagcttgtgcgtcgctgatgccttgtccaccgcaatggagaagtcgctcatgtcgaagtcgtccacggtggcgtcgtacgagtagatgctcgtggagaaatcggtcgacgagatcgggatgcggcccgtggtgtactggatgccgtcggccgagtagtaggcgtccagtatcatcttctgcatcgtgctgtccattttgtgcacgttgatcgctgcggcgtccgtgaaggcgccaccaaagcctacgatggtttggtacgtggtactcgcgtcaatggtcaagtcagcgtcagctgaagagcccgagacgaacgtggccgtctcgtagcggaaacgctcgccgtcccgagtggtgcggtacacgcctgcctggcccgacgacagcttcaggtagtcgttcgggaaggtatcgcaggcgactgtgctgttgcagacgcacacgccgtcgaggaacttcttgtagcgcatggaccagttgttgcagtcgatgccccaggctaggggcagtaccgcagctagggcaacggcggtcaggaaagagattggtttgaccatgacagtcttggattcttgcttgacttgggtcgatggaggccaaatccaaaatgactggtgttggcgcggtcaagagtggaaggaaatgcgccccacagactgctgtcacgtcggcgtgataggcaagcggcaacgtcgatcgtgacgcgatgagcagtggtggcagacccgcttgaacattgttcaaccacgggctgcaaccttcctgacgtcctgctgcttagtctacaaaaaggatcgataccttccacttcaacgatggggtgcgccgtttaactcggacgaatcatgaggggatggacgctgttggtctgctgtccgaacgctcctgtcgtcaactgcaacctcctcatcctggtgccatcaacgacgtaggtcgcgagataaacaagagccatgaatctgctcctcggtgttcgagacgcgcgagccagccgttcgcgatcctgtcacttcaacccggggggtccactattcaagtgcttcaagaggctagtattcggtacaggacagtaaagtgtagtgtgcagaacacggttgattattgtgtacaccacatcaaatagcagtaccgaggacatcagccatcaagataccccggtctgctgtcgagggcgcgtttgcactccttgttgatgaccatcgagcatggtctccgcgcttgtggcaatcatttctgcagcgcggattatcgttcggctcgatggagctgcgctggatcgtctcggtggatcctgcaccatgctaagcgcctcaacatgacgtgtgcaacgtcgtcaacctctgaatctgctccatgtgacacattcccagtgaccgatcgggcaagagaaggcactcgcaaggatacacgcccccgtgcttcatgaccgcctgctcgccctggcgctggcgctggaagcagctctccattgccattccccaactagcctggtcgagacgaagtacagtacacacgtcggaacatgttgatcgtcaagcccattggctacgtgctggcgctgctcgcgctgctggccgtgagcgccgccaccaacaactgcacgtcgtggtcggagcgctatcaaacggacctcgagggcgtctgcgtgtgctcggaagccacgtgcgacaccatctacaacggacacctgtacctgtcgggcaacgaggcgggcgtgttctccacctccaaggttggtgaccgtctcaccttctcgacggttggtttggagaccacggctaacgatgccgcggactttgtcattgacaccacgaccacgtaccagtcgatcatcggattcggaggcgccttcacggacgcctcggccatcaacgtatacgcgctagactcgggtctgcaggacatccttgtggacgcgtacttcggagacgacggcctgcaatacacgctcggtcgtatccccatcggctccacggacttctcgctcaccatttactcgtacaacgacgttgagggggacctggccatggagaacttcagcatcgatatggacaaggccaagaagatccccttcatccagcgcgcgatgagcaagtcttcccgcggtatgaagctgttcgcgtcttcgtgggcacctccagcgtggatgacgacggagaacacgaccatcaactgcgctgtcaaggggtaccccggcggtgagtactgggaggctttggcgctgtattactccaagttcgtctcggcctacgaggccgaaggcatcgacatttgggccatgacgacgcagaacgaacccacgcagcagttctcgttcaagtactggcagagtctgcgtttcaacgtcactacggagcgcgactttatcaaacgtgacctgggccccgtgatgaagaagaaccacccggacctgaagatcatcatgatggacgaccagaaggacctgcttctgggctgggacgccacgttggtggacgaggactcggcccagtacgtttcgggcgccggtgttcactggtacaaggacttggacttcttgatcgacacggccggcaacttcgacgacctcgagaccttccacaactcgtacccggacctgtttatcctggccacggaggcgtgcgagggctacctgatcgatggccttatgacgggcgccggcccgacgctccagaacccgactttcgcctggcagcgagcccagatctacgcccgcgacatcatcggcgatctcgctcactatgcctcgggctggaccgactggaacctggtgctcaacaccaccggtggccccacgtggattgacaatctggttgactcgcccattctcatcgacgaagagggcggcgccgagttctacaagcagccgatgttctacgccatgggccacttctccaagttcctgccgcccgactcggttcgcgtggctttgaccaccagctccagcgcttcgtcgactctcgccaacgtggacagcgtggcgttcttgaccccggacaaccaagtggttctcattctctccaaccgcgacagctcggcacacgacatcacgctgagtctgtccagccagcagttgagcaccagtttcacgctggaagctctctctatcaagaccatcgtcatcggtgaggtcgaagggaacagcagcagctctagctccaactccagcgctagctctgcgaccgagacgccgagtataacgaccgcgaccccgatcgcctccacggacagctccagttcgagtgcggagagctctaactccgccgcgacggtgacaccgagtgcgacaacggctgcccccgcctcatcgaccagcgctatcgcttcggctgctgcctctgcagcttcggagaccctcgagcccacgactccggatcacagctcgtgctaaattgatgcagtctcaagcactctggcagctgcaggaacacctcgtaaaaactcttgatgttatcaaacgctgcgtacgttgagctatcgtttccatgtcaaaatgcatgagccgagctcatggagctcttcgctcggaggctccgagtcggagccagcggatcaggtcctcgacactttttctacccccggaccggcaaacagactagtcctccatcaaggaagtggtccatgcgagtgcagacctccgcgcgtcttcttcgcgctgctggggcgctgctagcgctcctccacggcgtcaccgcgtcgtgctcttcatggtcggcacggtatcagcaacatatcgaaggcgtgtgcgtatgcaacgccagcagctgcgactcggtctcgactgagtatttagcgctctcgagcggccacgtcggggtcttccagacgtccaaagccggagaccgcctcgcgtactcaacgctgaagctagacgccagcagtgacgataccgcggatgttattatcgactcgacgaggacgtaccaagagattatcggcttcggaggcgccttcaccgatgcagcagcgatcaacgtttacctgatggacatggaagtccagcagctcattgttgacgcctacttctccgacacggggctgcagtactcgctggggcggatccctatcgcgtccaccgacttctccgagtacgtctactcgtacaacccgtcggtggacgacttggagatggccaacttcagcatcgatgtggacaaggacccgctctcgaacaagctgacactgatccagcgagcgctgaacgagacgactggagccggtcgaaacctcacgctgttcgcctcgtcgtgggcacctcctgtgtggatgacaacgggcaacacgacgctcaactgcgagatgcagggctacccaggaggcgagtactgggaggcgttggcgctgtactactccaagttcatcgtcgcgtacgaggcggagggcgttccgatatgggggttgacgacgcagaatgaacctaccaagcaggagctcgccaccaagttctggcagagtctccggttcaatacaactacagagcgcgacttcatcaagagagacttgggcccactgatgaaggagaagcacccggagctgaagattatcatcttggacgaccagaaggacctgctcctggactggaatgcctcgctgctggacgaggaggcgcggagctacgtgtccggcgtcggagttcactggtacaagaacttggacttcgccttcggcacctccggcgacttcgacgacctcgtaaccttccacaacgagtacccggatgtctttattcttgcgactgaggcttgcgaaggctcgctggtcaagggccttggaacgggggtggacacagacctgtttgaatacaacaacatcacctggcagcgtggagagaactacgcgcgcgacatcatcaacgacctggccagctttgcgagtggctggacggactggaacctcgtcctcaacaccactgggggtcccaactgggcggacaaccaggtcgacgcgccgatccttgtggacgaggagggtggcgcggagttctacaagcagccgatgtactatgtaatgggccacttctccaagttcctcgtcccgggatcgctccaggtccagctgaatgtgagcaccaacgccagctcaacattggagaacgttgaccgagtggtgttcctgacgccggaggggaaactagttgttgtgctgtccaaccgcgacacaaccgagaagaagattcgcatgcgcctccaagccgaagagcacgcgctcacggtggtacttccagcgaattctgtgcaaaccttgctgttccctgtcctcggtagtggatccgagaccagcggagtatcggccagcggtcaggcaatcagcagcggcacgagctccggagcttcctcgacgtcgaccatgaacttcgcagcagcgttggtacttaccggtagcctacttgtagcaatgcagtcgtgatagaaattttgagcgcggttgcttccatcttctgaagagcaccatggaacgaccaccacacgttggtgcaggcatcaagaaacgtgccctattgtcgatttggcagataccgtgagttgacctcggctcgacttgggttcatctcgctcacactgcagcaacaacagtactgtacgctgtattttcacacgcctcatttcgccactcgtccgcggcagcttctactgcacgtggcaattgaatccgacggcgacgtgttgaagtgaagcgagcaccaaaatgtacactgcgaagggatccacttggtaaaagcgaaccgctgctagtctgaagagacacaacaacaaagaccgaccatcgaaagatcgatgagcatggtatggatacagtacgtgtattttcaagcgctgcactcgtcaacacccgcacgaatagcaggcgtaagcttcagatcaccttgaaatctctatggcacaattattttatctgcacgaaagcaaacacttgactttgtctatctcttgtaacgtatttgtatatcctcaccacaatctacaacaagttggcttttgttatatcccacatttcattcaataattgcaactcattcgttgtccagttcaacctctggccctaaatctcttcccgccgttggccacttcgccatttgcgcacaagccgacaaagcctcccccctcgcttctccgatcgcgtccaagtcgtccgagcctccctctctgcatcccagttgagccgcaagccgctagagcccaccccttcctctccccgttcatcatgcacgccgtttcctcgtacgtcgccatcgccgtcgccgtcgccgccgcggccatcgctcccgcttccgcgcaccggatgcaccacgcgcacgccatgcgcggcctccaaatggacatggacatgagcggcatggatatgtcgtcgatgagctccatggacatgacctcctcctccaccacctcgagctccacggctggttccatctccacggaagactacacgtgcccggtctgcgggatgagtacgcttgacaacggctacgacaacctctctcatattggcttcaagaacggccagacgatcttcacttgcagtatggccgctcgctcgttcgacgactacgacttcgaggtgacggacacgtcgtacctggccgccaacgttgctgagttcatcgtcaactcgacggacgcctccgcctacgccgagtgctcggactcgtgcgacgagtgcgcggacggcatcaaggaccctgtcacgggcgacgacgtcaccacctccaactaccagtacgtttgcctgaacaacggccagaagatctacttcgcgtccgtggccagcaagaacgagtacctgagcaacgtcaactcggagccgcgctacctcgtggacagcatcatctgcgagagccagacgtgctcggacgctgagaacatcaccgtgctcagtgccgcggcccaggcgttcgtgccggacctctcctcctccagccgcagcggctccactgccgccagcgggtcgagcgcgtcgagcgccgccatgtcggtgaactcgcccgccagtctgaccttggcggtggccagcgtgctggctgcgttggccgcgatggcctaagtgaataacgtatgagcaggtgactcacctgaggtgatgcagcatccgaaagcgacgaaaacctcgcagtaccttttttaattttgctgtagactttcaatacagagcacatttagatcgaaattccagcgttgacgggggggtctctatacttcctgtccgagacgtgatgaagttggtgtttcatcagcggggtcacttcctcgggatgcccaagatggcggaggtgacatcgaagcggccgtttgttcggccagtttcttgaagggaaaacgtcaaaaggtgtatgaatttgaaacgttttgtcaaaagcggttaccttgtgccattactaatggcccattaggtgtacatgtatgctatggttgttggttccaagcgcattaaggtgcatgataaagctgcatcagcaacgaatgcggtgattggtgtgtgggcttagatccaaatccataaaacccgggttaggagggcttctacctgatgcaactagcccggttcgtggtgtccatgacgttgatagcgaattgtacggctgagggactacaatgaacgtcgttatcgattgtagccaggcctcagcgttgccacagttctacaatacctacactctcccccggttgggggctctcactagagctccttcacctccgaaattcagatgcaaaacctacctagtatagccatgctatatacgcttacgcggtttgcgttggtagttccttgtagctacaatagcgaagttgtcgagtacagttgctctatatgctattattagttgaccgtgttcgctacgagcgtgtcgttaataaactactgtgcttggaagctcgatcctgggtctgtatgacccgacctcggccgaaataccgcggcaaccaaaacgtgtgtcagtacgtgtatgatgagacatgacgcgacgtaccgcccacgaccgctacacctattgacaaacgttttcccaacgcatacaccttttgacgttttcccgtttcttgaatgacaaggggtccagacccttttctgctgagtcacggcttcaaccagaatccaaactatcgggatgaccaaccagatcgtcttaaagacagacgacgaagaccaacccacgcgcagcttcaccgtcgatgccgtctatgcaagagttgctgctgtccgtagactctacggcgtagagagcatgggtcactgacccagcatgtctttgggctgttcgaacctgcagcagacacaaccgctgatactttgattcactttcaaaagcgccgccgatcctccaagtcactgccaagtcaagactacctacaaccatgcttgggcactacctgctggccgcattggccagcctgttggtcgcgtcacaagaaacctcagccgcctgcagcaactggtccgcacgctaccagaccaatctagctggagtttgcgtctgcaatgccacccagtgcgacaccgtctccaacacttacaccagcctcgaaaccgaccaagtcggtgtctacgccacctccaaggccggtggccgcttcgcctataaggtggtcaacgttgactcgacggcggtgagcagccccacgtactccatcgatgtgtcgacccagtaccaaaccatgatcggcttcggcggcgccatcacggacgcggcggccatcaacgtctataagttgtcgtcggcgctgcagcaaatggtgctggaccagtacttctcggagacgggtctgcagtacaccctgggtcgcgtgccaatcgggtccacggacttctccacgagcatctactcgtacaacgatgtggtggacgacttcgagatggagcacttctcgatcgcggtggacaagtcgtcgtcttcgcacaagatcgacctcatccagcgtgctctgaacacttcgtcgcgtgatgtcaaactattcgcttcgtcgtgggctcctccggcgtggatgacgacgaagaacacgaccattaactgctcgctgaagggcagcccgggtgaggagtattgggaggcgctggctttgtattactccaagttcttcgacgcgtactctgaggaaggtatgggccatgactgtacagaacgagccctccagctcgatcctccagacatccgaatggcagtcgctgcgcctgacaactagccaggaacgcgacttcgtgaagctggacttgggtccgatgatggcgaagaaccaccccagcctgaagattatcgccggagccgccagaagtccggcatcttagaccgtcttgcaccatttgaagacgcagatgcgctgaagtacatcagcggtcttggtgtgcactggtaccgcgacttggacttcttcctagccagcgcgggcggcgacttcgacaagctgctatccttttaccagaagtacccggacgtcttcatcctcgcaacggaggcttgcgaggggttcttgccgagctggctcggcacgggctctggagtttctcttacggactccgacaagagctggtcccgtgcagagaactacggccacgatatcatcgaagacctgaacaattacgtcgccggctggaccgactggaacctcgcgcttgacacgacgggcggaccgaattgggcggagaactacgtcgacgcccccattctggtggacgagacgaacggggccgagttctacaaacagccgatgttctacatcatgggtcacttctccaagttcattcctgctggctccaagcgcattgagttccccaagacgaagacgctgaatagcttccaccgctgcgcgttcgtgacgccggacaaccgcgtggtgatccagttcatgaaccgagatagctcggctgtgacggtgagtgtgaaacagacggactcgaagacgttcacactgtcgctgccggcacactcgatgcagacggtgatcttgcccgcgtctgatgataccaagatcttgtagggctgtagctcgacgctctttcatgcgcaggtaggattcagagagagaggataactcggtaggaagtacgtgtaataacagcggactgctcaacgccgaataatggattttgttagtgtccgtgatgaatcttcactcaagatagaaatacaataaagctaactcacgttggtgccaccgaaaatgttagcttgccgagtggcgaataatttatgtcacggtgacagacactgcaccaggagtcctgctacaggcaacgttatcgaggcttctcaaaattgcatggtaaaggcgtcgttcctaagacttcatgggttgattaaaaaggcaaacgctacgagattgtacttagtatggcgttgatatgtacttatatcgtgccgacgacaatgtactgcatccagtagtacatgcatactcaaacaagtaaaaccgtacacctgcaactggagattcttgcactgcagatcttttcgagtttgtttcaggggctctttcgacctgtaagagaggggggatctctgcgcgggaaagcctcgctcaatcgcatcttacatgcaccgtacttagtagcgcagacctctgctccagcgtcattgttgatgacgaggctagacttcgcgggtactaagacccaaaggttgacctctcaaagatttatcatagcgaaccttcttccatgtggaatccacacggacaagaaaggatcccatttttcctgttctgctgctccgtattgctattacaaaacttttatgttttgaacaagttgacggtcccatcggaaatgctatcccggtggatggcaagaactgtgcactgagtatgggacgctcgtggactccgtaatgcggaccccacagcgcggagccagcagtgctgcagctagagaatgtaaacggatgagccaatccgttttgaatagacttgaatccggtccgcggcaaccggatttaaaacggatcaaattcggatcgaatccgtttggcgtgggagttcattggacagaaattgaccaatcgtgcttcaatgttactctgtgtattttgttgtacctgattgacgtgatacgagcatatcggccagtagagggcaaaccgcagtcgggaatcccgactcgggatgggcttgacggtcaagccttgaccactacgcgggagccgccaacctcaaggaggtaatcggatgaaaccacggtacttctacctcacgttcattctccattttgcttccaaggccacggagtacgtggcaccaacccacgcccttcaggtcacacgtcaagtccggcggtgcactaccgcacacaaatcccatcactacgaaccgaaggatcgctgcctagcatggacgacaccgacagcgtctctacggtttcttctatcggcccgtccatctcttccgtcggtgttgctagctccgtgggtcacaaacgcaagcgcaagaacgcttctgatgtgttcgagtacgttgatgagctcaatacaggtatctacaaatgcatgctgtgtacggctgacgagcaaatctggagcagtcgtaacactggtaacttccggaaacacctcgttgactatcatcctgaggtctacggcaattccagcgccctaccatcgaatgctcgaggcagcatccgcatagccgccgcggtgatgaccccagacgctgtaaaaagctgcgacgataagctgattaaatggatcgttgtgaattcacactcgtttgcggttgtttaccaagaggagttcgtggagttttgcaaggagttgcgtccggagtacagtgttccgtgccaacagactatccgcaaaaagtcctcggtcaatggaaagtggagaaggatgttgctcgcgtagagctttgtcgcgaagttgctggacgccgtgtcagcttcatgaccgacatgtggacttccccgtcaaagagaggctacatggtagttacaatgcactctatcgacagcaactgggtgatgaggtctgtcattattgcgtttacacgcgtgatgtatccgcacactggtaaacggctcgccgaccacttcattcgcgcagtgaaagacatggatgcctcacttctccgctgtatttggacgatcactgccgacaacgccaccaccaactcaaccatggtagctgagatcaacgaacggttgcagcgcgatattgaaagactttcgcgaacggctctagcagaattgaccgaccctggatcgccacgcgggcaaaccaccagctcgacttcaagaactgttgttcagctacgatgcaccgcgcatgttctgcagttggcagtaaaggaaggtctcgaggagtgtccatttgtcgattctgcaattggccatttgcgtgacatcgtgaaaaagatttcggagtcaactaagctgtctgaagcacttcaaggggtgtgcagtgacctggacgaaaactttataacccctaagcttgatgtgtcgacacgatggaatagtacgtggactatgatggggagccttctaacgctaaagcagcccctgaacgagttgcttcgccgtattcgtggtaaggtccgtgagtatacggatttcagtattcgaccaagtggttcgctggccaaggagatttcagtggaggcgtgggcggctgtggacgctctttacaagtttctcaggcccatcaaagaagccacttatatgctatctgcgtcgacgtatcctacgttcgggatcctgctctacgcgtactctttgatccaggttcacgcaacggaaactatagcaaccgaacaagacgagcagacactgaaatttgctggagctgttaagtccaagatggatgagtacacggtgaaggtaaatacaagagaagcccggatagctctagctcttgatcctcgtgctaagcggtatctgcacctcttggtggaagatgtcagtcaaatcaaggaggaaattgaagatgagttcaacaagaattaccgcgaagcatttctggcccaacagcaactagcctccagtccgccgtcagcaaaaaagaagcgaggtagcgagctgaagggcctcatggcgcgtttttccaatcagaatggtgaaagtatatccgatggcacccctgtggacgatataggcgacagccagcttgaaactagcggggttttaggcggtcgggaaatgcagcgtgagggttcgtcgttcgcgaaagagcttgacaggtggctagcagctgatgaaggcatgagtgagatgaaagaagcaagcgagtgtgcgcgtggtttcaagttacgggggacgtctatcctcgtattaagcaaatggctcaagattttttggcggtcacggcaacgtcggttccaggtgaggttgcattttcagcagcaggcatagctctcaacgatcgccgtgctggcttgggtgatgatacggtgagggcaatctgcgagctgaagtcattctttaactttaatcgccgtctgagtgaccaagagttttcgaacacggatgaggcagcgacttgtgctcatgagtaagcttattcacaatataatgtgtgtttatatagttgttcgtactgttttgaggtcacatcttcactaacccacacgctaaagcacaccttcgtgagatcttcattaagccacgccagctgctcaaacatcgactgacactgtgtcgccagctcacgcacgggacaaataatcacgacacgcgtggactgcacacgactcgaacgcaacagcagacggcccagaatgggcagcaagaaggtagcggtcttaccactacccagatgtccttgtccctgagcgcgatggggatcggaatcggcgtcggtttctcgaagacaatgtgctagatggcttgcataatagggcgagacagcttcaagtcggcgaaaggcttgaacttggtcttgccgaactcctcggcagcgaaagggtccgtcccgaagaactcggcagccttcttctccaacgcgtccaccagctcttcactcgactgctgatctttcttgctgtccttcagcagcgattggagacgcttcacctcctccacgacaacgtcgtcctcttccacatcctgctcctccttctcgtcatcagaggactccgactcctcctccatctcgtcctcactctcgctgtctccgtcacctcctccttctcttcttcttcctcggagtcactgttctcgtggccggttttttggtgtccttctccttgtggcgcttctcgatcttggcctggatgggcgtgcgcctggtggccgcgggggtgcggcgctccatcttctcgatgcgcgagatggcggccgtgaagtcccacgagctgccgcctgacgtgtggaaggcgccgccgtcgtcgaacttaaagtcttcggcgatctcgttctccttcggctgctgtagcgcctccttctgctactggcggccccgcacggcgcccttgagccccgcgccttcctgctcttcctccgagtccgagctgtcctcgacactgaacatttcgtcgtccgacgcgatgatcatcaccaggtcctcgtcctcctgctgcacctgttggcccgccttttgcccatggtcgctatcctacgtcttctccagcagcgtgttagcgtggacagacactgccccgccgcgccctgatctaacatcgctatgtgtgggatattgggctctgcttcagcgagcttgggagcatattcaccaaagcgccgtagtcgctcgtgttcgttacccacttcatccggctctgtgtgtgctggctgtgattgctccaccgccaagaagcgctgctccaaagtctctctagcagcagcgatgcgcatcgatatcaggagaaaacgtcatcaccttgacgcagctcatcttgggccgtagctgcgtacagactgttcatcaccgaggtgtcggcgcagcgatcaccttttcgctcattgtcgccgtcacagtagaaacagactgaatgcgctcttcgtcttgctgttggtgccggtcttactgcagcgctcgacataatactcgcctcctctccgccgacgcgccagcgcgaattgccccaccagcagcagaagcaccgctcatagcagcagtgccagcatgaacagaagatcagctcgacatgttcacagtagcagtagccaccgggccagacgccgacgcagacgcagactctccgactccacctctgtggcgtcaaacagcaacaaaagcatccggcagtactacgctctggatgcgcatgcgcagctcctggcgtcagacgcatgtacacgctgcgaatggtgagcacgtgctcagcaaggctcagctccactgagtgatgaacattatatcatcggcgaccatgcggccctggctcgccttgtactgcgtgtccgtgtccgcagcaacctttgcacacctgtgtattggtgcgttgagctcggtcgtctcaccgcgcatggctgtcaggtccagcttcttgacgctgctgatcttgcgggcgcagcgcgcgtacatgctcctcatcgccgtggtggcggctcctcgttgacaacaggcatgctgggacacgcgcacatgcaggaggccggatcaaatcttcggctacggaaggcactgtagatctgcgcgcagccgaagggcaccttgctgatattatactcgagcagacagcggaagttgcggaagatgccctgggtcgtctcgggacacaggtagccagtatgtcccccctgggagccgttggtgcacttgaacatgaggttgaacgagatggggaagccccggtccgcgtccatgcatgcgccttgatgtcatactgctgaaagatctcgtggattgcctcgggcgagtatgactcggccatggtggcctgcatctcgtacttcttgcgttcctcctgctcgggtctgggtacttgcccagatatcgtccaagagcagcttctcagcgcgcccgacttggagcacttgaccatgaggtccgtgaagcggtcaacttgacccaacgtttgagcaccacctcgggcatgatgttcgtgcactcaatctccagcagcttgtcggcggacacgaattggcggcgccagaacctgtacgcctccttggtctccactagcacggtccgtgtgctcgagcagttgctgctccgtcgcggggtagatcaggttcaactgcatctcattcatttaccacgcacaatatccgtaagtctccttctcttcccacacccattgcaatgttcacgcaccttgtacggctagacatctcgcgccacgtcttcctggaacgtgctgtagttgtcgttcaccaggatctcgagcagtgacatgcccgccagcagtcggtccagagtgtctgagcccatgaccgccgtctggatgctgagcaccgccgacttcttgtggttgccgctcttgaaattgcacagcagcgtcatctacagcaggttgctcttgagcgcgcaggacggcgagccaaaggcatagaaccgctcacgccgccgtagatctcggagcttggcaccacgatcatcttgcgcagcagcaggttgtccagcgccttgttgtcgctcttcctgagaccgtcctcggcggaggtctgcagcaccgtaggcatctcaagccccaacttgagcttcttgagatcgtcgacgatggcctgggcggcctcgcccgccgcgcttctgcttctgcttctgctggcgcacgtgcacgtgcacgcaaatgacgagtgacagtcacagctagatgtgtacagtagcgatgcggagggtgctctccgttttcgccgtcgtcttggcagcgccagtcgcatccattctcgacgttctctccgcaggttcggcttcgactgtttcgtcagagaacggcgcaaactttgatatcgaatctaaatgcttttgaccaaaactattagaaatcaccgacgcattctagcactctaattggatataatctttcctctttcatccaattggcgtcgttattctacccctgagatttgatatccaatgtcttgttataccgtttatacattaagtttaaggagtacattgtagaaatgaatacttttataatccgactcaatccggaatatccggattcaagtcggatgcatccggttgtgcaatccggattccgtttgcaaccggcgacgtgctgccaaacccgctcgaatttcggtggcattcccagtccggcatcgcgatgaaggttctgtccccgctggctgtccttgcttcgagtctgctgctcgccccgtacagcgtgtcggcggcgtgctcaagttactcctcgctctatgagtccaatctggagggcgtttgcgtctgcaacgaaacccagtgcgactccattgtcaatgactacaccaagctgaaggagggccaggtgggagtctacaccacatccaaggccggcgcgcgcctgacttacacggtcgcgaacgtcgatgactcgcccgtggacgaagccaccttctccattgacgtcacgaccaagtaccagaccatgctgggcttcggcggtgccttcacggacgcggcggccatcaacctgtataaactttcgtccaagctgcaggacatcgcgctgaaccagtacttctccaagactgggctcgagtacaacatggctcgtgtgcccatcggctcgaccgacttctccacgaggacctacacgtacaacgagaaggtggacgactttaagatgaccaacttcaccattgcgtccgacaaggcgccgtactcgaacaagatcaacatgatccagcgcgctctcaacatgaccgagatgaagctgttcgcgtcctcgtgggcgccgccgctgtggatgacaaacggagactcggtcatcgactgcactatgaagggcaagcccggtgagaagtactggcaggcgctggcgctgtactactccaagttcttcgacgcctacaaggaggagggcatcaacttctgggccatgaccgtccagaacgaacccgagaagccgccgctcgctgtttctcagtgggagacgctgcgtctgacggcggaggaagagagagacttcatcaagcttgacctcggcccgatgatggccaagaaccacccggacctcaagatcatggccaacgacgaccagaagcccggtctcttggagcgctcggcgccgttcgacgacccggaggctaagaagtacatcagcggcctcgccttccactggtaccagaacatcgacttcatcctgccgctctccggcaacttcaagaacctcgagatgttctcggaaaagtatcccgacatgttcatgctcggaacggaagcgtgcgagggcttcctgcctggtcttatcggtacgggtaagggccccgctcttgacgaccccaagaaggcgtggaagcgcgcgcagaactacgcgcgcgacatcattgagaacagcaacaacaacgctgccggttgggtcgactggaacctgttcctggacacggacggcggtccgaactgggccaagaacatggtggacgcgccgatcctcgtggacgagcagaacggcgccgagttctacaagcagcccatgtactacatcatgggccacttctccaagttcgtgccgcccggatcgaagcgcatcgagttccccaagacggagacgctgagcgacttccaccgctgcgcgttcgtgacgccccacaaccagatcgtcatgcagttcctgaaccgcgacagctcggaggtcaccatcagcgtgaagcagacggactccaacacgttcacgctcacgctgccggcgcactcgatgcagacggtgatcctgccggcctcggaggacaccacaattctctaagtagactttataaaactgcgtttgatggccactttggcgtcgaaatgtgcgtctcaaaacaacatagcgcgctccattagctgttggcgaagaaagttgctccaacagcttcaccggaggagtatttaattggttcaagggaccaggatttgccttcatctttccaccacctcagacccatcgccctcaggcttgaagggctcaagagtaaacacctccaacatcgggagtgtgctcccttggagacagatttgttcgctactgttgtttgtaaatgataattattactttgaagcactaggtaggaagttctcttacagttctaacgtcttcggcacggatcgatgctctttcttcttgacactgagcggcagtgttcggccgaggaatgcctggtcacagctggaaggacgtcgcgacgccttcgaagacaggttcaggcgcagaaagttactggtagccgcacgcagcatcgacatctgcggcactgatcccatgcccatggtcgcgttgaggatcaacccccagcgcgagacccccaacttcttccatagcgacgggttatctgcagctcgatgccaccgatacgagacttgagacgcgtagcccagactcttgaggtccaagaaggacaacactctctcgcgcagactttggggtacaatgtgctctccaagctcgctctgtcctcgtccttgagctcgtcgtaagtcttcgttccctgccgcgaactcggactgggtcttggcgtcggtggcttcctcctctgcaatgtcaccgtagcgattcttggctgcgagatcgcactcccttcgaactagcagccgcaccgctcggtattggcccttccgagcagcgtagaacagcggagtctcttgatcctcgttccgggcgttgctgtctgcgccgctgtccagcaagaactcggctgcgtggacgtgtccgttgaagcacgcgaggtgaagaggagtttcaagtgcgtcgttgggaacgtcggcgctccatccgaagtcgagcagcagcttcaacacctccaaatgacctcgagcagccgcgtgatgcaccggagagtacccgagctgtaagacgtacgtacagtcagcgaaacaatggtcagacgtgcagaataccttgtggttagttattgaaccataccaggcctttgcatcgatccttgtcgactccttggtgcagcaacaggaagactgcgcgttgtttgcccttctcactagcgatcagcagttgctcgctcagtttatcgctctcgtctcgcagtagactcgcgacctgtcgactggcgtcttctatttctttctgtctccgcttggtcttgctcttcttcttggtcctttggccgagcttcacacggttcgaccatcccgtctcgggctcttcagacccgagtttcgacctgccaagcagagccttctctccggcggaggttgacggacgcacttcatagccgcctacgccgtcagtccacgtcttgtcgatcgccatgccttaccaactcacgatcaccagacccaacacgactcgactcgatctagctcgaggcgggcaaatataggacttccactcgcctgctaccggtacgttatacttataagtatgaaggtttcggcccgagttgcccccgagtgctggtaaggagatgcggaagacatcattgatgccctgacagctacgacaacgcggctggatcgacctgcaacaaaattactcgacctactacatatactgtacatgaacatacccaactgcaggttcatgaactgcaggctgaaggtgatcactttggcaggatttgcatttgtctctccaccacttggaatcgagcaatcccccgcaacagacgggagtggttagagcaaccataagtttggttgcttttagccattctaagacatatatggttgcttttagggatttcaaaaattacgagcgtaatttaaatgtctaaattaccattaagcccttaggtacgcaaatcacgctaaagtgcgcttctgattaggtacgatgccattaagtgcgccacctcacagccgctcattttaagaatcgcgctgctgaacggaggccacgtggggcacgcacctctcgcgaagaagtcaagcaccaaacggcgaggggggaccgatggctcctgcggggggagccattataaactgtaatcagtatgctccatgttggtggcaacgagagtatctacgtgcctcacattttgtttgaattctgtcggtatgtattgtttaggccgaaagctgcggaacgtaaacgaggagctaaactacatgtacgccgctctcgggattgaaaaagacgacgacgaagacgaagactttgttctggatgaggaggatgaggaagacaacgacgacgaagaggcggaggattgctaccaagaggaggaagacgaagaagaggttgatgatgacgaggagagcgatagcgatgaagaggagggtgacgacgatgaagaggaggtgagtgacgatgaacaggaggcagacgacgacggagaatccagcacagaagacgaagcagaagcgggtaagactcgtttggattattgttgatacttattaagttgaactgataatgtattgtttatttttttagtttgtttagaacgcaggacacgcaaacagagccccgagccaagaaagaaagccatcgcacgcaagaaaacaccaggtattctcgttaaagttgctttaagcaaaaaggttgcgctatcattaatattgacattcactttggaatcgatagataccgctctggccaaatgcaagctttctgctggggatgaagcccaatctttcgcgaaaaagcgtaaggcggagctgcagcttcacgagtctgtcgacgctgattcggccccacgtttatccaagcggaacaagcagtacataccgcggaagcgatcaagcaagcaccttgacgagttgcgggagatcaacgaggagcgcgaagaaattatcaaccccgttctgccctttaccccagcgattatcaagagttggagcaagttcaacgcacacttgaaaatatacaagcagaagcaccacctcaagtttcgagtacgaagctcggagacacgaaatcagtacaacatgtatgggtgacctctgtttgatgagcaatttaagttattaacgaaaccccctttcatatgcagcaatcatcgggaccaaatcccttcacgttttaattggagtcacaaggtcctccgctgtacacacggtgttttgcaagcgtcgcgctccaagggacatcgcaatagaaaaggcaactattgcgggtgtcctgcacgcacgacaccaaccgttcagcggatggaaaatggcaaatttcgaattgtcataagaaacgaggtatctgccttttcgtgtatttgtttgctttgttagtatttctcacatgtcgctgttgataatcagagctttacccacacgcacccgaccacccgaacgcaagcatcgttgtacctgacaacaaagacacttccgttggacgagcaagatcttgaagatgttaagactttaacggatgctagtgtttctaccaagcacatcacgaacttcctgaatgagagaatcggtgcgtagttttatatatgatatgctgaagtgatacttacgttattgttcgcgctttgtgtgtttgctaggctgcaaaataacacctcaacagacccgtaatctgatccgcggtattatggggcacgacgcagcggaggcccgtttgaaagacatgctgcaagctatctgccagttagacggtagtgacgtccttgttattcaagaccaaatggacgtgacatgcggtatcgtgatgcaaacaaagtgcagaagttgatgttcgagcgctggggcgacactcttacgatggatttcactcacggcacgaacaatttgggctatcacttgggtgcgtatgagttgttcggtatagcaactttatctttgttacggcaaccttgcgtagttatagcaaccatatcgatgatatagcaaccttattaacaagtgatttgctactgttgtgtgtaggatatttcaggaagtctggttgtctcaaccgctactggtagagggttcccagttgtagtcttcatatgcctcaaccaacgagctccgatgatgacaacaatcctggagtatttccaagagaagaacccaagttggcggatgatatcttccatcgtgatcgacaaagatttcgttgagtggagggtgctgaaaacactatttcctgctgcgaaagttttactttgtcaattacatgccatttcgtactggaagaaggtgatgcagcgggccccatacaagctgaaggtgtctgaaggcgacgagttactcaacctgatgataacaacgctgtacaggtacgcaacaggttctatttatgattcttgtggtaacgctaactttggaaaacaatccatatgcagctccacagagacaggttacgattctagttacggtgcattgaagcaatactgcgaagacaaaaagaaacaagctttattctcgtactttgaaaagaactgggattcgtgtcgagacatgtgggcgaactttgctcgcagcaaatttatcacggctgggaatattacaacgaacaggatcgagtcaaactggaatcaagtgaaaatgggaacgatttgtgaacttcatggcagatgcgacttgtgagcgtacagcgtcgagtccttcacaatggaaaatttattgcgggaatcaaacctttcgctgtcacgatgtggagtggacgtgtacttgtctattttatagcagtcaccatttaccatgtcgccatcttatgcacttagcacgcgaggggcatggcttcaaactgcttccagctatggcaattcatgatcggtggagtacgtaccagaccttggaagtgaaaaacgaattgacggctgcagcggaaatgttacagccaattgtgcagatgtccaagttaaggttgccgaaagtaaagttgccgaacgtcactggggctgaaccagaacaaccactttatgctgcggggggtaacgcttcgccaatcaaagctaggaagcaagtcgcgtacgtacggctacggcgaggtgaacgggcaaaccaggttgtattgtcttcagctgaaaaatacgcatacgcaaaagcgatgctggaaccgctattggaatacctgtcagatttgtctagtgcagacttctaccaagagctaagtgcctggaaggaaacgatcgacatagggctcaaccgtgtcaaccctgccccccaaccgagttctacagaatctgctgaagatagcaagcaagaagaagatgtatctgaacctgtctcagactccattctggaccccgtggaggcaatggggactatgacgctcatggacgcattggaaagcagccccatgaccatgaattatggcgattacgagtccgacgaaagtatgttaccgacacaacgcactcacctttcgcagtcatctccaattcgaccccccatcgacgagaaatctcatgacagctgcgtaatgagtagctgtgacaaggtttcaagctctacgaagcctgacacagagtcgcgcgtgcgccaggtcgatgtcgttagagttcctaaccaccaagccaaggaaagtcaaggttaactccgaagcagctgaggcaaactacgatcagtctcaaagccgaccgtcttgctattcacaagtaccccactgaacttgccgtgactttggatcagttcctgatttgggccagaaacacctcaaatctgaagcgcgtgatggagatgctgtcgaagtatcctgttcagctggaggatgcctatctaagagctcggaagattgattgtcattgggaaattgtacgacctgcggactacatgcacacatttgtaattccacaagacctcgccctatcaatgcaggtagcaacgactactaccaggaaggagaagcagccaattgtactggatgaaaaggccaagaagcaaggacttgctctcgacgtcgtcttggcgattgatccaaaactatggaaatttagcgggtgtggttgctttagcggtatgtttgctttaatagggttgctttaacatgcttatgtttctagacaatatgtaggtgctctaacaggattctccgcgatcaaggcgaagtgtacctcatggttgaaggaccgaaagtggctggagcaagattggcgtaaagttgactccatcgtggatcttttcgctgcggagagagcaactgcaggactaccgcgtgatgctgttgccgagcggcaccaaggtctagcgaacgaaattacctcaaagtttacttcaagtcggctacgctctgaatttgtgacgctctccaacaaagtcctgatcagctttgacaacatcgtgggagggatctgtcgtggatggctaaatgatagccctgtggccttttgcttggagacccttgcgagatcggtggggaagtgccatgtgctgtcatcactgacatgggctatcggatggccaagtctccctaagacagcacttgcagcaacgaaatttattatccaccccgttaatctgcacgcagaccactggggggtaattatccttcgcctacgctacacggcgaaaacaagcaagcttcgggtgcatgtttacatgtacgagccgctcattgatgatgactatcaccatgaaatggaaatcgtgtggactggaattccgaaagacaaagaaaatgaaggaaaggaggggcttcgtggttatgtggagcggtgacacaaggcttctgatccccgtgaccatcttttcttcgatccgattgagtagatctgtgcccctcaacaacttgattttgctagctgtggtgtaatggtagtagcccaagcccacagctatcttacggggaacttgcagatgcaactttctagaatttccaagaacgacgtcaaggtgatgggattgaaaatgctgtgggtcatcatgtgttactcccaagaacgtcatctctctgaacgcgacgtcgctaaagctagccagattcatcagcagctacagaaccagctctgagaaacaccacagtctgtatttacctttaaatacagagtctatgctgcattagtatttcatttttcgcaccgccagctccagtagaacatcgagggaaacagcgtcgtcctctgcggtgagaccaccttggtcggccccttcatcgcccatgacggcagctaacgcatagctgttctcttcgcgatcttcgacgagggcttggatttgtagctgcgctgccagaagctttctagatgctcggtaagctcatccagcttcttcttgaggagtgcaatctcggcgattctcgcgcgcaccagctcatgtgccagcgatttcttctccacttttgctgtcgctcaaaatctgctaagtgttgaaaatgtgggacacattgtcatgtgtttcatgtattgctgtgtagagaacatcagttagacgccaccacgacgtgtctaaatttagagagatatgtagcaagaccatgacgagggcgacgtgtccctgtcatttacgcgtcatttaaaataaattaccgggtgccagctggttttagggttgctttaggccttgtggttgctttaatttctgtcgtgttgtcgtcatatggttgctgtaacgccattcgcaacagactggctttcaagagtatacagacaacgacggataaatacggcaacgcaaaacccggcacacatatgttgtactttttacaataattcagatagccaatcaacttcgagatttacacttgacatttgtattccatatggttttaagtactttctataaatttgtgtgtactttatgctccattacgtgtaacgtatgtcattgccttgtacaatctctatcgttcctgacagagaattctggcacatttactatcgaggatgccattcagtggtgccggatttatccgtcgttgtctgtacacctctatcaatagcgttgctcgcgccatgcaccgcccgaagtatctgacctttgccgccgcagtggcagtggcattcgcaccgtaccgtacgctggctgcgtgctccagttggtcgtcactgtaccaggcggagctggaaggcgtctgcgtctgcaacgaaacgcagtgcgattcggtctccaacgcttatctggagctcactgaaggacaggtgggcatctacactacgtctcaggctggagcacgactcgagtacaagcaggacaaggttgatgagaccccggatgacagccccaccctctccatcgatgtctcgacccagtaccagagtatcatcggattcggagcggccttcacggattcagcggccatcaacgtctacaagctctcgcccaagctgcaaaaggtccttctggaccagtatttctcggaaaaggggctgcagtacaccctcggccgagtatcgatagggtccaacgacttttccacgagcatctactcgtacaacgatgtggagggcgaccttgccatggaaaacttctcgatcgatgtggataaagctccaaactcgcacaaaattgagctcattaagcgcgtactgaagatgacctcgcgcgatatcaaactctttgcgtcctcgtgggcgccccccgcgtggatgacgaaggagaactcaactattaattgccacatgaagggcgaaccaggcgacgagaactggagggcgttggcgctgtactattccaagttctttgatgcgtacaaggaggaagggatcgacttttgggccatgactgtccagaacgagcccgagaagcccctgctcgcgtttgccaagtggcagacgctgcgtattacccccgaagaagaacgagacttcatcaaactggaccttgggccgatgatggccaagaaccacccggatttgaagattatcgccaatgacgaccaaaagccgagcatcctcactcgcctagcgccgctggaggaccccgactcgcttcaatacattagcggagtcgccgtacactggtatcgcaacgtggacttcgtgctgtggatgggtggacacttcgacgacctgctggaattccacgacttgtacccggacctgttcatcctcccgactgaagcgtgtgaaggatacatgccgaatcctttgggtaccggtaaagggccttcgctcagagacgccgacaaaagctggaagcgtggagagaactacggccgcgacatcatcggagacttgaacagctacgcggccgggtggacggactggaacatggtgctggacaccaacggcggaccaaactggtccaagaacttcgtggactccccagttcttgtggacgccaagaacggcgccgagttctacaagcagcccatgttctactttatggggcacttctccaagttcatccccgcgggctctcgccgcgtcaagctgtccctgtcggaggacgcggacagcgacttgaagtcgtgcgcgttcgtgaccccgcagaaccaggttgtcgtgcaattcttgaatctcgagcgctcagaggagactgtgagtgtagagcagccagatgccaacaccttcacggtcacagtgccagcgcacgccatggtgacggtggtcctaccgccgtccaagagcaccaccgtcctcaagccaacttcaacgtaaggaataattacacctaaatagtagcccgtatagtctcatatgaagattcgctcactgctggacgatcgccattcgactcttcagctgcccatggctcgcctcgagaccaagccgctgctgcccctgggcaacgatcactcgctgcactgcggcgagtcgttcgctcggcgtctgctgtccatcccgcgcgaagtgatcccgctgtcgttgttcgccttcggggggccgccggctcacctcgcgctggcccacgaccgattcgtgtgtatgtctctatactgtagacttagggtagctctttccccctcgctgtattataacgagagtgtgttgcttgcagacaagcacaagtggctgactgatgagaggttcctcgaggtgttgtccatcgcctcggcaatccccggcccgtcgtcgactatggtgagacttttcacatgaggatctttggacgcagtggagagctgacgtggtgcactatactctatatacactgctgctgtagactattgcagccatgggactattccgagctggcccattgggcgggctgctcgcgctcttcttctgggtgttgcctagctggatcattatgaccatcgcaggcttcggggccaagtcgtatctccaaggtttggtcggcttgagactgtgaagaatgggggtgaatactgactggtttattgctatccgtagatggcttgcccgtgtggctgagtggcctggccccggccgccgtgtcgattgtcgtgattgcggctgtccggctgtggcaaaaagcctgcgaggacgacacggccaagaattttgttgctgcggtgtctgcatgtgcgatcttagcgactcaaggcatgtcgtcgctgatcttccccggagtcatggcggcgggcgggcttaccatcttgctatcgaccatgtgtggctacttgcaagcgccactttccaatgaacgtgtcacctctagccacctggaaaggtagggcacaacgcacaattatatggtctggagatgattaagccaactactctgtgcttaataatacgcaggcaaatcggcatccatcccgttgctggagtgctgatcgtgctcttctggctcgtggtgctggtattgcttgaagtgtaccacccgcaggatggaggcgagcactcgcttctctcgctgttctacacattctactggatcggatccattatcttcggcggtggccaagtgatgctccccatgttgctggacaatgtcgtgatggccggatgggtctccaaggagcagttcttgatcggcctcgctttggtgcaatccctgccaggaccgctgttcaacatctcggcgtatctcggggcgctcatctacggtattccaggggcgatcgtagcaagtacgggactcttcggccctggcatcgtcctcttcttcggcttgcttccgctgtgggaacgtgtccgtagcaacacaagcttgaagatcttcctgtccggggttatcgcttcatcgacgggcctcattgtggcctccttcttcttgctgtgggataaggcggtgcattcaaacgcaaacgcagcggtgggactcgcgactgcgttgatggtggggattttccaagtgcctacgtcgatcgcgatcatcattggagccattttgggttttctactctcctcagaggtgtttggtatcggccagaaagatttctgcagctgaaatggcggaacggcttgcttgtcgtggcgcactttgcatccatccgactatgcagcacttactgtagcttttcaggacgtgacaagagtgctaatgacttccctactaggaaatgaagagagagggcttcttcttgtactcgcctgaacccgaggactttaagctaacgcgtatcctggagcacagggcggactcgaagatgaacagtatttttcctactcaccccggaccggtgccaatttgtggctcaaatccggacgtggagcctcgcgtaggtgtgcttgtcttgcccattttcactttcgccttcagctagacacacttcaaccatgaagctcttcgtaatcgctctttcttcaggtcttctcaatgaggtgaatgcgtggtggaagcccacaccggggacctcgtaccagatccaactcagtggcacacttgacctctcctatgacgccgatatgtacgacatcgacatgttcgacacgctcaacaccaccatcgccgagctgcagcaacgaggcatcaaggtcatctgctactccagcgccggcacatacgaggactggcgctccgacaaggaccagtacagcgccgacatcatcggcacaccgctcgacgagtgggaaggagagagctgggtggacatccgcagccccaagctgcgcgagatcgtcacgaaccgcatgaagctggcccaggccaagggctgcgacagcgtcgacccggacaacgtggacagcgccttcaacgacaacggcttcgacctcacggcggccgaccagctcgacttcaacacgttcctggccacgaccgcgcacgagctcgacctcacggttgggctcaagaatgacctggaccagatcgacgacctggtgtcgagcttcgacttctcggtcaacgagcagtgcgtgcagtacgacgagtgcgacacgctggcgccgttcatcgagcaggataagcctgtgttcggtatcgagtgctccggtggcaaggccactgcgtgtgccactgcgaactcgctggactttgacacgttgttcaagacgctgagtctacagagcgagcgctacagctgtcgcgatatgtcgggggactcgagtttgggctcaacgatgtcggaggattccgacgcgaagtctggattgatggatgaatctgaagaaagaaatggatcatcagataacaattcaggttcgacctcctggactagctcaggtaacgttttactgcttgttggtttagctgcatgggcgtatgaagactagcaatgaaatcatttcaagtagtaaagctaagcaagaatcttgacgtcgagaactaaatgatacaaaccaattatccagcgagtgccagcgttgcaaaagccgagaccagcaagctcacgacagccccttcatacccagatctagccgcagactttgtcacggagcgcgatccagtgctgccagtgccactgccaacatcgctcgagttgatttcgtctaggtgcagcgatccgtcactactccccttcttcttcttggccgggaggtttggacattggtgatacgcctcttccttggttgggcatgattcactcgacaagccatcacccgcccactggaaattgcgaaggtcaggggagcccttggggcatgtcgacgtctctacgtggttcgctggcacttcgtagtcactcaacgtcggctcactcgacccgtcgtacgacgcgtacgcctcggcgaggaactcgaagttggggaaccgctcgtacgtgcagttggcgcccgcgtccgtgcagtcttccggggagaagtagcccagcccgtagttctgcggcccgtacgtcgtgaaggggtacgcggacgtggccatggagttggcgttctccgtcgagtactcgaaggcgatgccgcccgcgaagtagtcgctgtactcgggcaggttcatgaaggcggcgtcgtggaaggtgcgctgcgcctcgtagccgtccaccgtggggaaggccggactgacgcagccgaactcggtgagcacgacggggatggagtagtcgtagctcttgaagctgtcgcgcagcaggttgaagcccgtggccttggtcgggtccgagatgtcgtcgcagtgcacgtacgtgttgatgccgtaccactgcgcgttctcgagctcgtcgctctcgtcggtgcggcagttgtagtactgcgcgttgtcgtctcggtccgtgtcggccacgacgaggcccacgggcacctggcgcagactcgagcaggactgcaggaaggcgcgcatgtcccggatgaacttcttctggcacggcgcgttccacgtccaggggttgccgcccgtgcggtggttgatctcgttgccgccgctgaaggccatgacgttgtcgtagcgcgcgaactgcttgatgatcttctctccgcgggccttgtaggacgccgggtagcacgcgggcgcggcgtcggccgtgatctcgcagccgtcgcagttggagccgaggtccacgacgacgtagatgccctcggcctgcagtgcgcacatgaaggcggagtggtcgacttctgggtcgacggcgtagagtcggatgacgttggcgttgagcgccgtgaactgcggcaggtctcgactccagatgtgcttgaagtcgtcggagaagaggtcgaggttgttcttgtcaagtggtccggcgttgggtcgcgggtagtagttgacgcctcggatggcgaagtagtcgcccgtggcggagttgaagaagcggttgcccttgatctcgagtggattgaacgtgttgtcatatccagcgtcgttgctaccgacagtttggccgctgctacccgtggtgctggatttggtgggggcagtagaagtaccagcggtagatccttgggaggagagcgacgaagtctcaccagattctgtaatggcctccgtgggcgtggggtcggtgaggatggtcaactcgggaggagatgaggctgcaatgttgagagcgcctgcagcgatggcagctacgagccaccacgaattgacgatcttgaccattttggagtcgaacagctctggctgctgggtgcgtatttcactggaaattggagaatggggtgaaggttctgtctactcccactctaaagcaccggagggcatccgttttatcgtttccatcgagcgctcgcctgtccattagtgagattgggtgggtcatctgaacattgtcgttgagaactggtggtcaatagacgattggggtgacacaagcgcatgccgcactgggatggtgtatctatgcatgcccaagtagtggcacatcgcacgtcgagaaactccctactgctatgcttgagaaacatgattgtatatttttacaatatatttttagggtcgtcgctcactccagcactcttctgggcgagttgcctcggtggagtgctcggtttcattggcaacaacttgtatagttggggttctctttcatacgcacacgcttcagaaccagtcttgatagtagaccttgtcgtgtaagactttccagcacatttcggatgcttcgccacttcttcctcggttgaattcgtcactcagagcgattggagggcctgaaacgggcagcttgactgttaatacttcgaagtaggccgggcacggatcttgtacgcaacagtaggcgaggaatcgatggatttctattgagtgatgtagtttgttcctgatgacagtctaaattcgatattgaacgacaccaggcaagccgcgaccacattcttagccacagagtgattcccgatcagaagtccctcggaacgtgtcgataaatcaactaccggtagcaaaagggaatgaagaagctcgagcggttttggatccgcattattcgcgcaaggctgataattaccggctctgttagaattcaacggtatcctcctacagatacggacttcatattggttgaataacgtaagtggcatttaaagaaaacattggaatcatgcatgccagatcagcgcacggaagtgagccacgggtcatggtcgacgactcaagacataggatgaatagcgaataaatcaaagcgtttgcagggtcgaatgttgccaatcccaccggaggccagcaatattttttcctctaaaaaaacaacccttttcatagccttgtcagatatatccgagagcttggacgtccacttcaattgaatgcaggtggcaaattgggcacaagaacatattttctagcgagtcaagcaacacaacggtttgcgagacggaatcttgcagaccaaagcctggtgttcgtcgtacgtggtggcgttctatcgaatttatgcgtcgggaatcgcggatcgacaatcgacaatcgacaagtcaagtcaagtcaaggcaaggcccactgctaagtttcggtataaacatacatgtagacagacagccactaaaacaccgttacgctggtcgaatttgccaatggggatgggatgcctcgccgctcgcaacagctcaaccaaaattccattacgttgccgaagcatgcttcatcgcacgtcttccatccaccctttgactctgctccatcgatgtctccagctgtgagctcactaaccaagtcgacaactaccgccgctacctgttacacttactgtgcccaacccttagcaaaaacatcgttcacgctgtcaagacactcttcatcttggtttccatgcacctgctaataactacaaccgagtccgagaccagtccacttgtgatcaagggcaaccgcttcttcaactccgccacgggcgactacttcgccatccgaggcgtcaactactacccgcgacccaacgccggaccacttgacaagaacaacctcgacctcttctccgacgacttcaagcacatctggagtcgagacctgccgcagttcacggcgctcaacgccaacgtcatccgactctacgccgtcgacccagaagtcgaccactccgccttcatgtgcgcactgcaggccgagggcatctacgtcgtcgtggacctcggctccaactgcgacggctgcgagatcacggccgacgccgcgcccgcgtgctacccggcgtcctacaaggcccgcggagagaagatcatcaagcagttcgcgcgctacgacaacgtcatggccttcagcggcggcaacgagatcaaccaccgcacgggcggcaacccctggacgtggaacgcgccgtgccagaagaagttcatccgggacatgcgcgccttcctgcagtcctgctcgagtctgcgccaggtgcccgtgggcctcgtcgtggccgacacggaccgagacgacaacgcgcagtactacaactgccgcaccgacgagagcgacgagctcgagaacgcgcagtggtacggcatcaacacgtacgtgcactgcgacgacatctcggacccgaccaaggccacgggcttcaacctgctgcgcgacagcttcaagagctacgactactccatccccgtcgtgctcaccgagttcggctgcgtcagtccggccttccccacggtggacggctacgaggcgcagcgcaccttccacgacgccgccttcatgaacctgcccgagtacagcgactacttcgcgggcggcatcgccttcgagtactcgacggagaacgccaactccatggccacgtccgcgtaccccttcacgacgtacgggccgcagaactacgggctgggctacttctccccggaagactgcacggacgcgggcgccaactgcacgtacgagcggttccccaacttcgagttcctcgccgaggcgtacgcgtcgtacgacgggtcgagtgagccgacgttgagtgactacgaagtgccagcgaaccacgtagagacgtcgacatgccccaagggctcccctgaccttcgcaatttccagtgggcgggtgatggcttgtcgagtgaatcatgcccaactgacgctgacagccacttccaatgcgcttcgtatgtggcagcagtatcgaacgctccgttatcattgaacgcaatgtttgcagcggatacaaactccgaagtctcatcgacaagcgctacccctgaatccacgccccagccacctgcgactcaaacaccaggtacgacaactatgtccacacaatcaccagaagccagactcagcgtccaccaaggttgcagaattcgctagatttctcgtctagccatgtgcacttcataacgtatttcattccactgagtaaacaatgaatcccgagttcaattgactttggattccgtcctgatttccattggttacagcagcagatctggtttccgcaattcataggcgaccacggccgcagctgggcgatgagacggatccaggctcatgcaacgcctggcaagggcttccaggttacggggacatgtgggagacattgtcactaacaattcaccagaagatacgccttgaagaatggccatgtcgttgagtggcgctccggtgccgcgagttttggcatctgcgaagggtagttggtgggtgtccagctccgagagaatgataccgaaagagtaaacatccacggcttctgtgtacttcccttcgccacgagcaatctctggagcaagccagcgcgtggtgcccacacccgcagtcatatcattctggcgtttggtagctgacaccccaaagtctccaagctttgcgcccttcttggagtctagtagaatgttgcgggatttgagatcgcgatgaataatgacgggacttagcgagtgcagatacacgatggcatcaatcgtatcgcgggcgtactgaagctttaggcctccctcctcccacggaaggcgcttgggagatttcttgtccagcagcgtgcgcagatctccaccgtccatgtactcgataactgcgagcatatcaaccagcttggtccacgcgacacccacaaactggacaatcttcgggtgttccagccacgccatcagcttcacttcccgcacaaaatcttcactggctgccagcgtcacctgctcttggatcaatctcttcactgctactcgtgcgctgcgatattgacccacccacacctcgccgaacgctccttgagcaatctttttcgcaagggttacgctgtcgtaatcgatacgccacgtcacaagtacagggtcgttcgatgggaacaacttgttcaccgcctccatttccttctggtagctggcgcgagctgcctggtcgaaaaacaaaggggtgtcctcgtgaataccttcgcggtggcgcttttgctgccacttgccaatgtagtcgtaaaccgcacgagcgacgccgccaacaacaccaagcgagaccaatgcgatcacgcctgcaatcataccgatgaccaccagtacgacgattgctgcgatgatgtacttcttcgtcgtgttgcttgggattggtaaatcaggaatcaccacccccacggtagccattggggttgtgggctcctccgcgttatcagcgccatggtccctcatcacgatcgctgggtcttcagctgctgcgacatccaagcggcatactccttttccttgcaggtaaaccagcgacccagtcgcgcacgaagacacatccgcgaatccggcctggaagtctgatagaccagcaaaaaagtcgtactgcgctgtcgacattgccgctatctcgaatccattgctggcaatgcggaagttgtccagctgggaagatgcaaacactgcgttcgggaactcggtcaaggcattggcggataaatcactgctcatccatggccaataaacaaattgtcaatacgacgacgatattcatcatttgaggtcgcgtcagcttacagagtcgtcagcataggataggttacattgtaagcactcagtgcgttgtgcgaggcgttcctacgaatatagtggcgaagaaatggccgtcagtccgtagcaaaggtacttgcagcacgcaatactgttgtagacgtacaatatcgcgatggttgcagaagcagcaaatgcaccatcaaacctctccagctcattctccgccagattcctgccattgccacgccatcccatcagttttgatatcaatcaaaaaacgataagccgagaccatcgaaagtcgtacagctctctcaaattctcgagcccgcgcacttcgtccggtatagcagtcagcttgcacttgaccaaagtcctgcaattacacagtccgattttttatcattagccagaaggtatcggatgcctcgtatccaaaatgctcccatacaatttctggatcgagtgcggcaggttgagacgcgcgacgtcgctcaggtcccagttttccagcgttctataatacacagccacaacaataaacaaataacggttatgagaggccgctgcttttccccacactattcaccgtcaagcaggtccgcgcacacgtcagtgaaggtgtcgtctggctggaagagcgtctctgggtgctctggcgcgtctccgtcgcccttgtagctgtacgagtcgccgcggacgatggggaagtggaagaagaaggcgcgcgcagggctcagcgccagcgccgccagcactaagagcctggcggagctcaccattgtccaaggggaggataaattccaagtggaaaatatcccagaggatgacttgctggttgtatcacccatttaagtacgagtgtacccacatcggttgtcgtgtctcttcgtgtacatcttggtgagttgaagtgagctgtacgatggcggcgctgcgctacggggacgagatggggctcgaggagcgcgcgctcgtgcttacggagcgcctgatagctctggaccaggtgaaggagtggaagcacctggtcaagacggagctggcccagccagagtaccccctggaccaggtgcagagtctgcggccctcgacgactgtggagaacccgctcatgtactgcctcctagagaagatggggctgctggggctcatcaagcgcacggtcatcgacctgcactgcgaggcgatgcagtcggtggctgcggcgtccaagaagcaggtgaagctcgcgtcagacgacagtcggctgctgcctggagctcaaaccacgaacggctgcagtctcgacgttgttcgagctgcgcgagacaattgggagaggatcacgagcgatgagatgctgcgagtcgcaaaggaactcggacgaccactggtggcgcctaaagctgctgcgccatcgtcgggaggctccgaggcttcagcacgagacgacgcacaaatgccaccagctgccgaagctgagggcacgaagcctgccaaagctaccaaggtgcttgctgcgcgcttcctgtatgacgggtacgaggtaccgatatcgctgggtaggtgttctcctgtggttgctaacgctgacacatatgaccaggaacgacctgcttcgttcattgcaagctatcgagccctccaacagagtccgcgaaccggcggaaacagccacagacgcgtggggtatggaacgatttcctattggggttggatggacatgattcacaccattgcattactgtgtacaggttccattcaactacagctctattctcctccattccacgagtaccgccgattattccccgagctagcaccaggatgcgggcaaattggactggacgagctctttccagctcagagaagtgccttcctggcagagaagaatcgcgtcggcgacctcgtactagcgcaccaaagcgtgtcgatggcgcgccagtactccaagacggggtgccccgtcagcctccgacctcaggtgctacgccacattggattccacaatcaaaatcgcaccaaaacatctaacgatccttcatcacaacgctcagatctggcgccaggttctatcggtacccgtcaccacgcaggaccggagccacttcgagcatctgaagacacaagcggctcagtggacgtatctcactgacgacatgtatttgctcgatctccagcagacaatcgacagttcggactacttcgtcttccaagatcacctcgagagcgtgctcatggctttcacgcgcgatacgtacgtcaagggccacgcactacaagtaaatggcaccgtccacggctcactagctggaacagaatccaagccggacgaagctgcaaacgaagactcggacagcagcgtaccaccaaatggagtgttgcctttcagcggacttgtcatgtacatggctcctcttgcatacctctacgctgatccggtcgaactatacattatcttccgcgagctgtacgcacgatactggagcaagctgaacgccatccgcactgaacgaggaacgattctgcctctctgcaagctgtttgaagatcttgtcgtgcgctccagccccgccgctgtcttccacctcataaatatcggcgtcaaacccctggacatcgccttcccctggattcagagcgccttctccggtacactggacatcgaccaagtcctcctgctctgggaccgagtgatcggctacgactcgctagaactcgtcgccatcttcgccgcggcacttttccatttccgcgccagtgagctggagactgtcaactcgcgtgaagaggccgaagaactttttgccgagctcatagatatccacgtagtgactttgttacaggaatatctatttgggcttccgtagaatttggccagccttactcgggtaggaacgcctggtcaacgtggcggatcacagttagcatcgccttcttgaaagcttcatagcaactatacgatggaagacgtaatatatctggattgtgctccatcgtaggatacacggcgtcggattccaatccagtaccgctctcggggcacagtgcgatagtaatacgaccagactcgccttcagaccggaaaaagtattcgttcaccaactggaatgtgccagtcatgaacagcaggaggagttgctgctcctcgtggacaagttcgttcatcaggcgaggcatcaacgcctttgcgttctcgatatcctcgccggacaatgtttcagatccgctaatatcccatcgaactgcggtgttccaatcaatttgacgaatattcagactcgtttcggggccgttgaatagcacgcgaagaccgtcagcgtggaaaagttccagagtggccggaagcacagcttcaaaccccgcggcaaaagaacgaccagccatctcccaaggttcatcactggccaacttgaacttccctttgcagccgatgcagcgcaaaaaggcaggaccaaagtcgagaatcccactaataggcacggcgaagagcacaaaatgtgctaccagctcgcccagcaagtaatacccgagcaattgcttatccagctcttgcttaacccccgaaagtggattcacttcgagatcgccactgtggctgcgcatgagcaaccctggcatttctttcagcaaccccgctgctaatcggattaggacaagcttcagattgccctcacgattctcgaggccttgactgtttgtgctgccccgtccgatggagaatattatcggcaagcggaagtcttccggctccaacctcattcccacgccaacgaactgcttccagaagcacccactctcacgtgaaaaaacaaacgcaagctttttctgcccccttggactgtcatcagctccgtcttcaacactatcagtgccttgccccggagatttcttgatagaggggataatgtacctccaaacatactcgagcttgttgtccaggcgaagcaaaaacgggttcgacagcataagtccttccattcgctcgatccgctcaggatcacacaggcaccagtcgtttagaatatcaaagcaagtagggtctcgtgcgacgcgctgctgccactgacgcaccaaccctctttgctgatacttgcccagcatccggtgtagtcgtgaaagctgtttggttagcttgtaatgcatgaactcttggataattgcagggttctttgcgtgtaaaatggggacccagccatcagagtccttagcaaccacattcaatccctccagcaaaagagctcgaacgcacagcgcatggttttcttgagccgcaatgtggagagctgtgagtccagtctctttaaccgcttgatccacatcgaagagccccacatggcacaaatgagtaacgagctcgtggttacccgatgctgcagcaaaatgaagagggaaccagccattcggagccttttcgttcaagcaatctccaaacacgtccatatcaagcatcatcgcgataatatcctttgcactttgagccgcatcgctcaagctcgctccctgctttctagttgagacagtcccaccagcagctcggcacaaaatcatcagcggatataagccctcaccagacttctcttgaagcatcgacggctgagctgcaaagataacttggcagattttgacggtgtagttgttaacagcctggcacgcgtaatgaataggaaagttggagtgcaaatcgcccatcccgattaatgctgcgtcctcccggataagggggaggcaaagctgattgaccctggccgatcggagcatacaatgaaaaggtgtgcagccccgtaagtcttgatggagcagcagcttcctatcgtgcttcaggagtatccgacagcaaaccactgaaccccctatcgcagcgtgatgcagcgcattgcgactctgtgaatccgtcgcgaaaatatcagctttgcgttcttccattaaatagcggaggcacttggcaagtccgttccttgcagcctgcatcgcgagagtcctgccctcgcacttcaggtttttccaatcaggaggaatgttcgtcgctcctgttttgtcttccagcaactccatcaactgcttcgagttcctgctgtcgcaacattgaaacaaccaatccagaattctcctggaggcttgtacacaacgcgccaaatatgcctcgggatcacaacgtgtgcacagatacttcggtggcagcttagtttcacaatctgtcaggaacccgacgcagtcggcatgctcccagacaccgcagtcctctttccagcattcgagccactgtccacggtagcccccaactgacgtagccccacacacgcatctaatctcgccaattatcgtcaacggctcaaaatccatgtcatcatcgatatcaacacctgcgtcttcatcgttactagtgactccatcgccttcttccttgccagaattgtccgttgtgaccacaggcgctgtcggcgatacctccatgaagtcgtcttcatcgtcttcgtcatcagacatctgcgtaagatccacttcaactgctcccccgttttcctggggttggtcggagtgtcgtaacctcttccgtcttttacttggacgcttaggcttacgaataggagcgtcatcttcactggtatcctcgggggcattccgtcggcgtgcactgggaggtggttgtgacagatctggaagatcatcgtcgtcatcttcatcttcacgttcaacttgactgtacagtagcctctttcgacggcgtttccgcctacgacgggtgctcatgctttcgtcactcgcctcgctgtccgcactgtccgcgctagcgtcactatcctcgctctcgctggcttctggaggaacgtactcgtcgtcaccgccctcggcccaaatggaattgcgtgcttttgtcgatttggagcgggatacagaggcctgctgccgctcttggttggacggttcagttcggaggtgaactcgtgcaggagcttcctgacgacgccgaggagtgggggttcgttttgtcgatttttcatgctgcagcctttgtcgcagctgctcttgctcttgtgctcgttgtcgtcgctcctgcacctggcgctctagctcttgcagtttctcacgctcttgctgtgccttcagccgccgctggtaatctttttgcttttgtgccagcacctcatgcgctttctgcctctgtcgttcatgctggatacggcgctcgcgttcttgttcttcctgctgtatccgaagtcgttgttcctcttcatgccttcgccacgcgtccgcctgttgttgttgccgttgcgcggccagttgattcatccgctgtcgctccgcttcttcctgacgctccctcgcgagtctgcgctgctcaaactcccgaatcaccgcctcagaagggtcactatcttctgctgctgctactaccgtcggtgttgccactggtgctggtcggtgcacagtctgcgtaaagttctgcagtgggggtatctgcggcgtatttgccgccgccgccgccgccgcactttccggtttcacgcgcacttggtccgctgcctgtacagcccgctgctgctgctgcgatcctgcgccatctgctctcttctctcttagtcgcttgtagaacttctggaactccgtgtggaagagccagagctccacctctgtgcggaagagcgcgaggttgctagctggctgcacgcggctgtggaaggcccacgagttgatggagttgacgtagaactcctgcagcaggttgggcccgtagagctgcacgacctcgagcgggagccacgtctccatgccgttgcgccagcgcgtgaagacgagctcccagcgctggccctcgctcctgctgcactgcaccaggtccagcaccttgacgaggtcgccgcgcgccacgcggggcatgctgagcacgttctgtttgggcaggtcagccatcgtgaaggtggccacgcagctcttggcgtacaggtcgccgcgcgtggacatgacgatgaacttgcgccgcagctggaagcgcgcgtaccagaagcgccgccgcgggtccgcgtggatgaacagccgctgcgcgaaggccgccgggatctgcgggcggaagcgcaggtctccctcgcggggcagcaccagccgcagcccgcgcccctccggcagcgccgggtacgccttggaccgcatgtccatcgtctcgtggcggcgctgcttggtccagggaaggttgtgactcaagagtgtgtgttttgcgtaggcacgtcactctttggtgtcactcgcgcgggggctctgatgtgcagcacaccaatgacatggccgcgtcggctcggacaaattcctttgccaaagctcggccgccgaccaccaggacgcgaacgcgcccggttccctccattagctccgtccgccccctctggcggccgctctctctctctccgtctaacgcctgcgcgcacgatgtcccgcgggccgaccatcaaccgcgaggaggaggacgacgaccgggcgctgcccttcccggcggcggatcgcgagcgcgaggtgcgcgtgacgctgcggcgccacacgacgggcgtcgtgaccttcggcgacacgggcgacctgtgtacggagacggacgacgtggacgtggagctggtgcagaaggacgcgctcaagcagctcatgcgccacggcagcgtgctctttgccggcggcgtggccggcagcgtcggcaagacggtcacggccccgctcagccgcctcacgatcctcttccaggtgcacagcatggtgtccacgcgccacaccgaccgcttctcacccaccgtgagcagcgccttcaccaaggtgctcaagaacgagggcgtgctggccttctggaagggcaacggcgccagcgtgctgcaccgcttcccgtactcggccgtcaacttcttcacgttcgagatgatcaagaacggcatcatcgcgcagaaccacccggcctttactgagacctcctggatgacgatgttcgcgtcgggcgcgctggccggcgcaactgccacggtggcctgctacccgatcgacctcatccgaacgcgactggcgacgcagcttaattcagatatccgctacacgggcattcgccacgccgtccagcgcatcagcgccgaggaaggtgtgctgggactgtaccgtggcatgggcgccacgctcatggtcactgtccccaacctggccatcaactttacgctgtacgaatcgctgaaggactacgcgcggacgttccgccgcagccaagcactcgcaggactgacaggcgtggagagggagcaggctgcggagatgcacgacggggcgcacctgtgcgtgacggacacgctgctgtgtggcggcaccgccggtatcgcatcgtcgctgctgacgttcccgatcgacgtggtgcgtcgccgattgcagatctcggccattcacgctcagagcgcaggcatcaaaccgacgccctcgggcattgcgtcggagctgttccagacgcagggcgtgcgtggattctaccggggtctgacgccggaactcatgaaagtggtgccgatggtgggcattacgttcggcacctttgagcggctcaagaagctgctgacagtggacgattagactcgaagagaagaagaaaaaggctagaactccgttaaaataatactgcgatggatgtatcgtggagtacttgttcgatggttcagggaacgctatcagaaaatagcactgcatttacgaagtttccattgatgttgctgcttggtcccacgtggtgctggtatcctatctggcttgaccgccggtctccatagagcaggtgatcccgacgttgtggatccgttcgtctctctacatatccgagagctaagagtctggtgacacggagcccgacgatgctgcgaaatggcgtcaacgcgacagtcaagcaaacggaacggcattcatacccttgagcgtgttattgtgatactttacactgtcgcagcagcaagtctccctcttccagcggaaggagcagtacggtgtgcacgggtctgcggacgaaatgcgccctccgtgacttggaaaatgcacaactaaataaacggcgcattgctagccaaaccttcgtgttgagcctgtcctcctctgttcgctgctgcttgatggctcgagcatcacgacgcgggtctcggtcagcccgttgtgcttgctgactgctcttggtcacctcgatgctcgatcacaagatgtcaccgatcgccagcgttggcgatgcagcaacgtcttggtgcagagggccgctaggtctcgaccgactcggctgaaatctttcacgcacgcatgtcggcaagtccgatccgtagttgctggtgtcttccagcggacggacacggcaggagaaaaaataatgccgttgaaaaagtaagaaaaagtgaaactgggatgccgttgttggtgtgggggctggactgctggtgctggaaataccgcggtcaaatatggaagagggacaggcttggctgctagattgacacggacgagattttgcttggtcgcgccggcccccattcgttctccatctgagtgtggacgccctcgggcggcggcatacacagctcgttctcccaggacacgacctcgacgtcctccgtgtgcttccacgtgagtactacggtcgcgccgtcgcccttctccagcagcgagttgatctgtcgaagcacctgccccttggatttgttcatgaccagtcgatggttgatggcgtacagtgtgtccccgacgcgcaggccgcagctggcctcggccgggcccttgagtccgtgccagttcgtgggctgagggccctgtccgtggtcgcgcggcacgaagcgcttgccgtccagtctgtagaagtcggcgatcacgacctcggcgttctgcgtgatccggctgccgcgggtcttgaccaagaggcctaaccgccggaagaagtcttgccggcgcatgcccgccgtctccaggtacggcagctgcgcgcgcgggccgatctgcacggtgtccgagtcgccgctcactcgcacctcggtctgccggtcgtggctgaggctggtcgcgtagatcggggagccgtagaagtccccgccgccgggcatgccgttgcgggacacgccttgccccatggtttactggtctactggtgcgcgccgccgacgaagaagaggagctgtcgggggccgcgcggcgctgaggggggtaagtgagagagtgccgctccgagtcaatgcagcggcgtgagtgctcgttcgtgggaatgcaaactgggcgatgggtctccatactttgaccaagtgagccgcgttgctaatgcaactgactactaaaccctaggtgtgtgacacactagaaacctgtcgaacagcatcgtttcttgcggtgcatatccgttttgctggtgcgatggtgtgtcgcacatcgcacgcgcaaaagttcaacgtcgcactttggcggatttacaaaatgcggcgcgttgtgctgacggctgggcatggagcggcggcggcggctcggttgccttcgtcgctgctgacaggcgccgcccacgcgcgctggctcagcgcagcgacgtcgtccgtagagatgcggcccatgacgcgaaggctggcggacggcgtgctgcagggcaatcgcacggctctcagtcggtccatcacgttgggtatgtacgagtcgcctgcctgccttgcttgaagttagccgcctgatacaccacgagactaagatagttaatttatggtgggatgatattcataatggtgcagtggagtcgacgctcaagagcgacgaggagcaggcggagctgctgctggacagcgtgctggcccagcgccggtctttgaagcccgctcacgttgaccaggcggggctgacgtccttccgactcggcattgccggccctccaggcgccggcaagtccacgtttatcgagacactggggcagttcctcactgcgcagggccacaaggtggcggtgctggccatcggtaggtcatatctctcctctccgcagccttaacgcagcgtctgtatcgttaaccgtcgctgttttgttgtcagatccgtcatcatctcggtcaggaggctccatcttgggcgataagacgcgcatggagaaactgtcgaatgacccgaatgcgttcgtgcgcccgtcaccgtcgcgcggcacgctgggcggcgtcgcacagcatacaaacgacattgtgctgctctgtgaggctggtggatacgacattattcttgtggagagcgttggtttgggtcaatccgagatcgtgattgatgatacagtggacatggtcatgctgcttgttcctccagctggaggcgacgagctgcagggccagaagaagggcatcgtggaaattgccgacatcgttgtggtcaacaaggcggacggcgagcttgcagcgtacgtttcgctgtagtcaggatttgttcgaagcttcgtggacttactgtatcgcctactatgttgcagaccggcgaagcacactgcggtggactatatgcacgccatgcatttaatgcgacgaaaggatccagactgggaaccgaaggtacaactttgctttgccctaatttttagcatgtgcacgtattgatgaagctttcgatgcaggtgaaaatgatatcagctcttgagaagaagggcatcgacaaggtgtgggcaataattgaagagtatcggaagacgatgggcgagctggataaggtaatcaatcgggcacccattctcatctcgtatgcctcgtgctaacgtgtgttgttttcacagattgctcaaaaacgtaatgcacaaagctccaagtggatgtggaaccagttgaatgagcagctcatgcgatctgtctcgcgcagtgcagcagtgcggcacaaggcagacaagatgaaggaggacctcgttcatggcttcatcagtcctcgttcagctgctgcaaccgtgcttgaactatttcttaagtctcaacaagaggcaaaatgaagccgtaaaggcagacgtaggccttttggactgagtgtttcgagatccagcgataacatgctagcaacagaaatggagactgtcgtatttcgtaagtacttggcactgtttgatgatgatttaattgtacaattgagtgcaacgggtaagtagttttctgccagctcttacaactacggcttgcttcgctcagtagattgacgaggtgggaggaatctgctctgtggatagcatcgagagcccgagcgacgacgctgtggcgcttcctgtggcggtcgtggccgtcgctagtttgcggggtctaccttgtcgcttaactttttggcgtggagctgaaatctgatcttgctgctgtagcatggcgtaacacgagagcacctgcagagcacacagctcggcttcaatgagacttgacaggcggtggcgcaggtttggggacgccttcgccagtagctcctcctgtgacggcagacactccactcgtgatgcatcgtttagccgtttctgcagcttgtacgggtagctggaagtattcgggcccatgccgaactgtgagtcgaaacccgccactactgcacgcgagcgctttttggtcgctcctgttgtctgcttgtatagcccactgactgccgagcccatgggagcaattaggatggcagcggttcctttggcttgacctgtatagccgccacgagccatttgtcgagaggcgtctgaagcatcggcgtcgtcgtcgccactgttctgagcgacggaggagccaccgtcactgaaataaccgaccggtccaggcatgaccatggacagcccgctgtgcttacgcacttcgtcgtcacgcgcgagcttggcaaagtacttttgggcatggctgcggatctgagccgacgtgcgcgtcttgatcttggccgccacctttttccactcgcggccgtacagtcgcaagcccgcgaggaagctctggtgttcctgctcggtccagcgacctccgttcatacctgtctgtcccttttggtgagttgcattggacgccgcaggggctgctactgcgctagctgatggtttcgtcttcgccgtttcaaggctcatcgagattggcgacgcactcgccgaggacaccaaaggggcgattgtcggtgagtcgacgatgctgtcgagcagctcattcgagcgcggagccgccgctggcagcagaatcggactggagggcgcagactttgagctgtcggtgggactcccggctgactgcgagtgtgtcgaggatgctggagagagcgacatgagtgcggaggacgagatcgggtcgcgaagcatcgactaagagtagcgatcgctggaccacgggccggatccgctgatcgtctgttgagctgctgtcgctgctgctgcgatcctcgttcggctcgctggttcccttggccggccggcgccaacttgagaagtgagcgagcgatcgagcggaaagatattctttgccgcttcttgccgctgggtgcctcggttcgtttcgaagtctgtcacttgactgggcgtcagtatggcgagcacacgcgcgagcccacctaatatgctcggcgccgagcagttacgcctgcaaaaccaccgcaggcactggcactggcttctgctcggggcccggatcctgtgaaaaccaccaccaaaaagatttgtcgcccgaccagagctgctcgcagcatcgcgctcgctggctttgcggcactcctgcgaccagctcctattcataggcgctgagctggcggagtctcagcccatggcatgacgctgacagccaactacattcgtttcaacgagagtcgcgttgacgagcttattaatagtcaaagtggtttcgcacacacaccttcccgtccgttgaccgcccgccaggggcaatacaaagctgcgcggcaccttactcgctcgagcaccaaagcagcatcgatcctcaattagtaggtgaagatctcacgctccgttgatcccttcagagcagagtgtcgagcacgtcgacggctgtcctctcgacgctggtcttgtgcttgttgtcgcgcgcgagttcagtccacagcagttggtgcggctctgtcatctcctgccaaatggcagcggcctcgtcgctggatatcgcctcgttctcccggcgtttggcctccaggaagtggcgaaaccctgccgagtcgcgcagcgtcttgttgttggcctcctcttgctgcgcattgtacacctgcagctcagcttcgtagcggtgcttgtcctctgcagccatacgcttgtacggctctcgctcagcctccgacatttgacgccacagtttcccacagagtgctgagcactcgttgtgagacatctgatacgttgagagcagctccgtgcgcttggacatgtacatcaggttgtaggccgtcttcggtcgccgcggaggtccggacttgcgcttcttgcgcggcacagtaggtgtctttacctgaacgggttgaacgggcccttgaactgcttcaaccaactcctcctcatcatcgaactccttccgctttcgcggccgtcttttggttagaggattggcagcctcctcttcattcttcttcgcaatatgagcttccatctctgcccgaaagcgctcaacatcctcatcagccttgcgttggtagacagcacgctcgtcgtcacttaaagccttccacgtgacaccgatttcccgcatgatttcggggttcttacgaccaggacggcgatctaccagctcctgccgctttgccgacagataacagttataagcattcatcggcaagcggggagctgccgagtcctcgcgagccagacgcctgagctcttccatccgtttgtgtgaacgttggactaccaagtccatgtatgccggcggtttgtaggcattcatctcggtatcgtaccgccgctggtcctctttagccagttcgtgccactccgccttgtccgcgtcactcaaacgcttccagagctgactcatctcagcacggaactcgttaatcgtcatattcagtagcatgaagctctcacggttgtggctcataaagagctggaaggccgtcttcgccggtttgggagcgaacgggtctttcaatggagttttcagcgcagacagcatgtcaggagtagtagctgctagcgtcggctgcatgcgcgcgatttcttcttggaagcggagtttgtctttggcggccaagtcttcccagacctggcgctcgtcatccgacagagccctccattggcgcccgacctcttttgacacgagtggcgccgcgaggaacgggtttgcagctaccacttctggtcgttggctcttccagaagcaaatgtaggctgtgtctggctggcgtggctcgttggattgcttcttccgcttgggtggggcctgctcaggttgctaacacattgaagaaaatacatttagaggtcgcaccccgttagccgccgtccacggcagcagttatatcgtttgcacgcacctcatcagactgctgttggttcacatgatggtgggcttcagtgtggaagcgcgccttgtcgaactgcgctagctcgacccagggtttgcgctcggcagccgacagcgccttccactgcctcccgagctccgccgaaacctgttgcacggaccacgacggattctccgctgccaactcgtcgcggcgagcgtggctgaagtgcagatacgcgttcttgtgcggcgcaagcgcctcgcggctgcgtgccgtctccatcgggggggggggggggggtcaagaggtcaaaatgaaatcgataatttcgagacgctgggaccaatcatacttcagtatttgaagcgcaaaatttgtgatttgtgaacaatgttgaagttgcacatgcacctattgcagcattctgcgcatgctgcgtctggccgcccaatgcgtgtgcactctgcgcagcgcgaggaagagcactccggcagctgtggcggctgcaccgctggcactccacgggttcagcgcagtacccaagagggcaactccccacacaaattcgtagccgacgtgcagcagtcgcgtggctgccagcacccctgcgccgtcgaactggaacccgcgcgtgaggaagagctgctctgcgaaggccagagcgcctgtgcccaggatggcgccccacgtctccaccgacaatcctgccttgaacttgccgtgctgcaccactagtatcgcgatgagcgacacgagcgtcatggtcagcaaaaagtagttcatgacgacaaggtgcggcaccttctgaaggctgcgcagagacacataggcgcctgcctgcatgaccacagtcaccacagcacacccgatagccagtgactcgccgaacaggtatgaggtcacgaagcttgtcatggagcggcggtaccacttggcgtccgtcgatccgttcttcccgaagacaaaagctggccgcacaacctgcacagcaccaacgacgcatagtgcagagcacgcaagtgtgaaggcccccggcttctccttcagaaagaaagctgcctacatggacacggcgtgcaattagaaccgggagatcgaaacaaacaaatggggcgtacacgaacccaccattgcgaacgctaggagcgggctcaggtatgtgattgctgtggcgtttgacacctccagcttctggataaccagaactgtcagtgtcaaggcgatgcagcccgtgaaacatcggagtagaagcgggcgttggaactccttcttgacgcgcatcttaacgccggtagcggcgatggcagcctggaagccgacagcacaatgtcaaattaagtaccatccacgctatcataatgagaacgccagaacagcaacttacgagggttagcagccacgacacgagcgaacgccagaagagcgtctccacggtcgagagcttgaaggcgtcgtccttgaccagcgtggcgatgcagctagcgaggaaggccgacgtccccaccaggatgagtccggctatgcgattggccacgctgcgcaccactgcgcggcgcataaagcgcgggagccacttgccgtccgttgacatggactcgagcgagtcggaggctacgagcagcggcaggttctccaggtgacgcatggctttcttgccactgtcgatcttacccgccggcgcggagctggtggcggtcgcgtacacggcgccgtatacggcaggtagaggcatccttgcagtgctgcgggtggacgagaaatgacgatcttccagcaaaaactcaggctcaaaccgtttgtcctgattttcaggttgattcaaatcgttgaagcggtgtctattgagctgcgtagtactgtacgcctggtcaccgaacaacttcaacgtgaagtgcttgcagcactaacttgacagcggagtccgcattggggcggcgaacctgtcactctacacaggtggtggaccggacccgttagcgacttgccagccattgatcacccgtggaatcaacctatccaaacaaccgcagtggttcgagcaacacacacctcactgactcaacgcctatcagtgtgcaaacccagcgccagcaacctttcgtgctcgacaaaggaatcgagaaatagctgaccgacgatgcccaacggaccgagtgacgccatggtacggtgacgcttacggccactccctccaagctcgatttcgtgttaaatactgttgtctactgcaactttgatccgatgaagggcagcataggaatctgcttgcgaaccgagcaatcagcaccacgagcgattacacggagctccgcgcggtgcaacgtcagacactcggcatagaacctgcgagagggtatccaagcagttcacctcgtgtatcctcgttggccaaccagagacacacagctcactaatagaaccgagagcgttcgtctccccacgagcctcgtgacgaggcagcaagcgctgcagcacggcaattagtgctccgtcaaccatacgttcggtggctggtgtacatcatcgcgagtggcacgagcacggtgtactagtagatattactactagtagattttctaataacagtaccggtgaaaggactattatactatattagtgttataaatttttctttcgacatttatgttttacaattgtagatagtacatattcgaccccaaatagtagtatatgattacttgagacgctaatttgaatcaatgctgttggtagattggctgctggactgctcacgcgtgttgaaatcgtagggtggttcactgcacaggaccggtctaaaagagagattggagcctacaagcgctagagagagatgtagcgttctggatgtgatcattcataatcatctcgcagctcgacaagtctgcaacgaccctttcactagtccgtctgccaagctcttccacggaatatgtcagctccgtgtgcttgcgtgctgacctaacggagcataacgttcggccagagcgttctccacaacagcagtaacgagctgtatggcgcgggcagattgtttgactgcatttgcagcgctccttgcgtcagtgccgcgcgtcgggttgggcagaactccatcggctcgatgaagcccttaccaacatgttttcttgaccggcagatatggtatgtgcagctttcgtacgagggcggacaatctgcttgctgaggtggaggcactgttaacgcacaataataaagatgcccgtcgcatagaatacgaaagcatcggcgcttcttggtcaacagcaaggccacctggtggtcgacattcgctggtcgtcagtagtaatctagatttattttgtattactgatgtagtacttttgacctggttggaatgctaattgttttgatagtattattgattcgagatcataactatagtagtttgtgcgcgatactatccctggctacggacgcgtcgccagtttggcaacaagaaaagcagagctcgcttgctcgtccgatcggcgccagggaagcgaagccgccaaccttccacacacagagacagctacctgaccagaccacagcagctgcacgacggtcaagacgctctgcagccatgggcgaccaccaagacgcgagctcgagcggagagcgcaacccgtccagcccggcagcggccatgagcggcatcgactggagcatctttaaggacggcgaggaggacgcctttgggtggctgctacgcaacaacaatgcgtcggcctccgctgctgctgctatgagcgctggtatgatgggtggaatggctgccgacattctgccgctggacgacattgagatggaccgcatgatggcggcaacgtcgtcgcagcaggcgaccaacggccagcaagtcggtgctgctactgctgctcaaggttgccagccgcttactgcagctcagacgaacgttcggttgatggcggcgcagctgtacgaaggactgcggccctcgccgtcgaagccaccagcgaatctgctggcaatgctgcccggcatgccgtccttcggtaacggtgttggagggagctacgataaattcgatgacgacgatgcgtgggaggacgaactggaggaaaaggaagcccaggagcagtcagaagcgaaggcggcgccctctgaaagcgaaaaaagtggtcctaagcaaggaagcggcgctgcatcgtcgcaggcgatcgaagagaaggcccccgctaggactaggagcacaagggggaagaccaaagcaaataccgctacttcggcaaagagcaagcgacctctgaaacgtaagaagagcgcaccagcttcgcccactgaaacaggctcgggaaccgaagaagaccaggaaaagaaacagcagcgtcgtgtcaagaacctggtgtccgtacgagagttccgcaagcgcaagatgaagcagctcgagcagaacgaggcacggctgcgtcgactggaggcggagaacatggacttgaagatgcgcctgaagatcggaaaggaggccattttgagcgagcagcgcgaaaagcagcagattaaggagcagatgcgggagatgctgcagcgcaatgccaacgagcaagaaatcgcgaagttcctcaacatgtacaaggtcacgtactcggactacggacccaagcgacgcgagaagctgcacttccacttgtcgcgcatccgggagctgctgctccccacacaggtcacgaaactaagtttgtattcggtggagcaaggtgtggatatgctcaagcgcgatcacgttataaaggaggacccgatgtctgctcctgaatcagccacagcgacgatgagtctatggggtatcttggcggacgagttgggagtatcagacgaacagcagcgtcagattttggagcgccgagctgctatcaagaaggtgcgcgacgatctgaaccacaccttgagcatcgtaaagaagctggaagaggtgacagacgagaaaaacacagcgctggaagctcaggtggcgcagctgcagcagattctcacgccttctcaagccaccaagtttatcatctgggtcaaggagaacccagcctttatgtacatgctggacaagctggtggactccaccctgcagaacacaagcagcacagaggaatgatataccctgccgcttgctgacaattagccgcacgctcgtatctgctccaatatccatcttctattcatctccttgctggcaaggtccaaggacgagaaagctggactattcagcagcgttgtaaccccgtggggtatttattcggtgagtcacagaaagaaagcaaagggtttagttggacgtactgactgcggagttaccgcgaagctgtttgtgttgttgttgctgctcttgccatcgatagcagcctacgcaattacgacgtaaataagcgctcacgtgagacgcagtccatgcatctttcgttgtggctttccttggtggctcgactacttcggaaataagtgcttcgcctgctggaaaaccttcgtcatcttctccatgctgtccatggtgccgttgtacagcaactttacgggtagatttccaccgatgtcagtttgacagatgtacgtcaaagtgaatccttcgggtccatcgacgctcgtgtcctccttgcagtggaagcacgagatgaatatgtgccctcgagtctttcctggacgctcaggcacatctggatgctcaacactagcgaagctgatggagttctcttttcgtacgtagagaatgcagaagtctcgcgaggctaccagtccacccaggaagggcttctgggtattcacacacacgctcacgtccgcatcgtccaaaagctcactggtgtcaaacgtttcgatcacttcaaagttcgcctcgttgaagtcccatacgctgcgatcttttgggtctttgctgtccatgaaggccatgaacttggtcatggagattccggtaatgaagacctcaatcttgaatatcgcgaacggcgtcttgtcggttgtgagctcgtaaatctctccaccctgcgtcgccttcaccaatttccaagagctttcaccactcaagtaatatgccagcgtgtcttccatctcgtgaacgcggtccaagtacttttctggaagaggcccactacctggagcgacagaggaccttcgacgcctcgttcgcactggcgtcgctctctgaggtgccaccgtgtttggctttgttactcgcattgcctcgtttggttggcttgaagaccctccggcgagccggtcggcgtgaatccacgggtgcagcgtcaggaaaattccatacgttgcgacgcagtaccataggcgctggtgaagcgagaaaccatcagcaagagcgatcaccagcagaatggaagcggcgaagagcgacatccagagcccgatcgcggagttcatgctcgtcccgtcagggccgtcacttggtacgagccctaaaaatgacgccacacggtaggacagcccaccataacctgttttggagatttccggtcgcttcgtcaaatcgtggtcgttcgagctatccatgaaagaaagtctgcgggagtcgctgaaagagtctgtgcccgtccacacttcgtccatcatcatggattcgcggcgctcggactccagcatggagcctcgaatgctggagcccaccatagagctacgtcgactcgatcccagcatcgacccagagtccatcattgaccctcgacgctcagagctcctgcctacaaagctcacaccgcgcgactcgcggacgtactcctgggcatccggcacggaggcatgggtcatgtgctgtgaatccccacgcaggcgtctgggggcgtcggacgagtttgcctcgttctcctgccagatctggccgaagcattggatgcagatgcgggagttccctttgagcctcttggggagccccttacgcaagcccagcagcggaaatttgagcgtacagaactggcaccgccacttgcggcactgcacaacaacaacagcagcaacaacaagcaacgtcagcatcggtagcccacagaaggagggactgcatgagataatgcagacgccagggtcttcatcggacgtacgtagtcgcatcgcttcggaggcagcaaatcgcgcagcaccttgaggttggcgcagtacaggcacgtctgggcgtcgacctcgtcccccgccgctccggtgcgcgcgtcgacggcggtcgtgtccatcgcaggaatggtgcagtacactcactcactctgtggtttcagagggctggttggcgatcgggtcgcgtgctcgcgggggatggcagcttcggcaatgatgtttacaggctgaagatgacggcaccgcctttttctaccaatcgccactggcttgtgtgcgccacatccaaattgaagccgacagatatggcaatggtcaagctctgccttactgcgccttgggtactactactgtacttgtcatacgagctagctagccctcacgcaggcggcatgagcaggctggaccacacggtgacgccagtgcccacgaagccgatcacgatcgcgccgatgaacagcagcagcgggccgatcttcttgggccccaggagcggaccgtcctccagcttcaagatgaacgcggcggggaagcagaagcacacgacggtggagcacgtgccgccaatgatgccgaagaccacgttgatgctggggcagaagatggccagcagcagcgccagcagcaccaggccgctcgtcacggccacatggcgcgacgtcgagtcctccgagttggagaagaacatcatgtcgatcgtaaagcggcacgggaaaatgttcagggggaaggccacagccacggtgaaggtgatggcggcgcggctaatagcgatcagggtgtcgctcaacgggaagctcagcaggatgttgcccttgtacttgggctccacgagttgaggcccgaaggcaagatacgcgaccacgccaatggacaggtagatcaggaaggagatcagcgtggcacggtccaccaccttgttcatccggcgaatgcacgggcgctgcagctctgtgtagatcgaaaatacgttcacctgaacaaatgaagttagacctgccattggcactatggaagttgttggttgcaacattgccttacctggcatgtgaaggcaaacatgacgatcggcacacttagcatgaagtccggaccacgactcaagtcgatcgtccaactgatgtcctctgggattccgttagcgcttgcgtacataatcgaccggatggccaccgcaaccaccaggaagatgatggaaagcactccgagaatggacgagaactgaaggctgctgatgtctttcatcaacgacagcgggagcatgatcgttccacacgagatcgtcatgagcacccatcgctgcgcgaatacgctttgcatcccgaaacagagctcgccaagtggcgtgatgatatctcctagcgtcacaaggtacgcaaccgaaatgccgaagcaaaatatcaggatgttcacctccacgaaaatcgtcatctacaacgaaaagaaaagtcgatggtaagtatctagccaacaccttcgccaccggtaaccaaccaagaagcgtacctttgtgtcgaaacagtacatcgccaagtcctcgtacgacttcaacctgtgacagaggagtcaaatatgtgttaggttgctgagctgctgttggatagcatttatgcagccccctacttggtgatgtcttccgcgcgaatcagcagtcgaatcgtgtacacagtaagcaccgcggccaacacaagttgagccacagcgaaacccaatccagaaactgccactgcgtacggcaacgacagcgctccagcgccaagcgtagcgccggcgagattgaagaccgagccgcgaatggagcccttcgacggaatgatggactggtggtacggaaaagcgtcgctcaggaggtcatcgtcgttaggctacgcataataagacagcagtgatcagtgttaacaatgagctaaggacccaaatcgttgcgcaagtcaaacctttcgggttcgcatcggcgacatggaggcgatgaagctgccgatcttcttcattttctgtaatcaagtacagtaatcccccaaaatgtaagcacccacaagattcaccaagcagcagcctccgtcaagcagcacgtttggggggacacttgacatcacagcacatgctcacacgccataagaacgaattcaccttgaaaatgagcggcgtgtaccccagctgcttcaggtatgagtcccgcagaggccgacccctcttcacgtgcgcgtcacctcgctcgacgtgctccgctgcattgcggtcgtacacgacgttggtggtggagttggagcgccccttgagcagcggctccgtgacgccattgtcgacctcgtggctcatcagagcggacttcctgcgcgtaacacatagagattagcaagaggtacgcagcgcagagcaaattccaccggcgcgagagtcgcgtgcccccaccaacctgcggatcccttggagaaaaaaagcacagtggtgaacggtcccaaaaagtgatttaacggttgtgtggtgcacaccaactatagttctgatccggttccatggtcaaatgctgctctagtatgatccaatggacgatctcccagagggagacaactacgcagatctctcgaatattaacgcactctttgaagacccaactcctcgccacaagacaacgaagcacacggacttgacgatggcctcgcaaaacttgcgaggcttcgccaaaacatcgcagcggcggtggcttagtggttggcgccgaaagagaaatggacagattccggatatcatcctcgtccaagacactgcactccatggagaggacgacgtacaagaagtgcagagtgcttggcaacgctcatggcaggtgacgaagactgagcgtcccctcagctactggacgacaacatcaacgaaattagctggactcggtatcctcgtctcgccaacgctgagtggcaagatcactccgtggcagcagagtagctggacatcccgagttatggcggtggagatggatagatggctgattgttaatatttatgtcccaattgccgacaaggaccaacgccaattcttccaggacttagagccttggctgcagcgccacgactcgataatcctggcaggagactttaactgtgttcttcgaccagcacgagatcgcgtcgtagcaaggcagccaagtgcagcgaattgcgaatgtgcagaactgaaagtgcttttagaccgcagagaattcacggatgctattgacttaggccgggacttggatagtgaagatgtggagacggatccccttcatcactacaccttctggcgcaagggcagtgcaagccgactagaccgcttttacgtcaatggagcaccgttcttggcagcccagtgggtagatatcgtggaccctgctttcgactcggatcaccacgaagtccggctcgcgttaaaatctggcaagcgacctcagccaaccaaaccgatagcatactatccgatcccaagtggacggccaaaacgggttcaagcaacgatagaagcacggctgacgcctctgctggacaaatttgattctgaagataaccctgttgcgcactgggatggtctggttctcgatattcagcgagtactagtcgaaaccaggcaaatcgatctcatccagacccaaagatacttcaagaagctacgtgaggaaacttgggtaccacgagcatcaaggaaggagatcatcgaggaccaggtcacagaagccggaaaccgagccgctagatctttcggcaaacacctccgcggatcacctgaggaagtacggagattttacaaaagaaactcggattggcaacgggaccagtcgatctcggaaattgccgcttcgccaggacacttctacgcggacgactatccaattgaagagcgaatggcgtcggaatggagtcacgtcttcgctgccccgcatgccacaactcccgccgatcggttagatcaagcctttgaccaatttgcacgcattccagaacggcaacgcctgaccaaggaggatatccagcaactcatggctccgatcacggaaaccgagacctggtatgctattcagcacctggagaggcacaaatcggcggggacatcggggctgaaccacgacttctataaagattttgcggagcagcttactcccagccttactacacctttgcccagcctaagttgtctaatccgcatccaaagttgtcagcttttattttgggtgggagcgaggtacccgaattaaggggtaccactctccttagtgcaagcgaagtcgtctaatccccaatcgaagttggcactgaccaaaagctaccgtacatgcacagtacacatgcacagcatcaaagtaagcaccgatgggcttctgctcgccgtacaccatgtcctcgctgcgagttgcggcgtcgacgaacttggccgcgtgcagctccatcttctacaccatgcgctgcgtgatcttgttcacatgagctgcgcgctcgaggatgcgcttgcgcgcctcggttttcatgatcggctggtcgtcgctgatgagcagtgggttcaggaactcgggcacgtacctaaagtgcatgtacatgtagagcagtacgcggatgactcttgatgcgcgttgtgtactgtggcgtgtggtcatactgctgctagcgcttgcggccaccgctgttattgctcctgcgcagcgcgctgccggacattctcgttggctcgcatcacgttgtcactcatggctgaagccgtcgtcgcgcagtcccggcagatgctatagctctcgtgcgatgctgggtagattgaggagtgagcgcgccccgcacgaagtcttggtcaacttcgcgcgcgcgggaacttcacgtcaggttctcgtcagttccgacaacttcgattggggattagatgacttcgcttgcactaaggagagtggtaccccttaattcgggtacctcgctcccacccaaaataaaagctgacaactttggatgcggattatacaactaaggctgggcaaaggtgtagtctctacaatgcgattatggcaggtaatggagtgccatcctcgttcctcgacgcaacagtgataccactgcgaaaaaatggcgactctgcggacgcaatggactacagaccgatagcgctgctgaacacggcttacaagctcttcggctgaattctagcagaacggctacatcccatgctgcccaggcttatcagccttcatcagcaagggttcgtacgaggacgcaatatcgacaaaactgtcacgattcttcgcagcatccgaagcaagagtaagtctctgccaatgtcagcgtgggcaaaatgtgctacagtactttgcttagatctccgtaaggcatatgacacactcgaccggaactacatgctcaaggtgttgcgggagtacggcttctctgagagcttcctcaacgtgatccgccagctccatgacggcaccacagcgcgatttctcgttaatggtaaactctcgaagaaatggatcgtcaattcgggtatccgacaaggatgtccactcgcgccgctactattcatactggcagtggatgctcttggactggcaattaaccagcaccccgcgctccacgggatcgcgataccaggacatttagcgcatcgccataaagtctcggcgtttgttgacgatagcaccatcttcctgaattcgattcaagaactcgacacagtcaaaggcatcctggacgactttggagcactatcgggcctacgcgttcaaccccaaaaaagtgtacttatggggctgaacacgtacggcaaccctcagcggtggaatgggtttccagtcctcagcccagctgcgacgacgcgccaacttggatactgggttgggaatctaatgtctgcgtcagccaactggaacatcagactcgagaaactgcaacgacggctatgtattgctacctcaatcagcaactccgtcgcacagagagtgcttctattcaatgtagtagcgctgcctggcattctgtacacagggaaacagttcataccatcgaaagctacgctgcgtcagctgacaaacctccagaaacagtttgtgtggaacagcaagactaccacggaaccaactcgacataaacttaacccagcactcgttttcacaccaaaagaagacggtgggctcgggctacaagatatcggactagctctgcaggcaacacggtgcaatctggcggacaagtggctccaaagtgaagatgatgcgtatgctgcagcctggcacgcagcatgtcacccgaacggtcaatgttactcgtctggttgcgtgttccgaccaacatcgaaggacatgctccacaagatgaaaaaagagaagcgagaagtgccctaaaccaacgtaccatcaatgggaacggctgaactttgggcagcgcactcaaaaggttcgctacccactgaccagcaacggctagagattcaaagggccatcatcgcgggactggccttgagttcctgctacgagataggcgaatcgggggttcgattcatgactcaggctaccccaaaacgcgaactcccccaggccaccttggctttcctgcagaacgcgacatggcaagaaaacggatgcattctcgatgatcacggagttccactcagacttagtgacttccctgcattgcaatcagcccgactgaaggacctgcacgtgcagccggaagcgggattgaccaccgcaggagaacacgcagccataattcgtccgtcatgcaaacgaggcaaggaggtgaaagaaaatttacggcaaataacacggtggtgccgcagcatcatgctcagcttaccgtggaccgtatggacttccataggcagcatcactcagcctatcgggatgccggttgatcagcagagaatcacatggacctacaacagcgcacgccgatcaatggaggcgaagttaatccggacaacagatccagccttcacggtcatgagaaatttagacggtttatcatggagactcgcccacgtatctccagagtaccgtcagaccgaagattttgagcagattgcggaatgggccaactggacgggcattgctttcacgcaaccccacaaacggccatctacccctggaccctatcaacggaggtaggagcacattccctttgcaaaaagctccgccagcagcgatccaaactttttaagtgcgaccatcactacagctggaaggatatcacggctaaggtgaaccaccgtgaatcatcatcagcatgggggcaggcagctctgactcaaagtccacggaaaatatggcaacaacgaggcatcttcaccgattatcaagcttggacgatctacaggatcacgctaggaactttaccacgacaactggccccaatgtcctaaaatatcgtgcaagtttgagaaggaaaccattgaccacatcatttggtcttgcgcaaaagcccaactctcgtggaaacgatggctcgacacttggcttggtcactcgagtacacccagcgagcgagactctcttcagaaggcaatagctgcacgtcaagccccgcctccaactgtggacttcatggcgagggcccagcaatgcacagcgcgatggacggcacaccacaatgaagccatgatgacaatttggatgatctggtcgacggtgacaccggtgcttctctggcgcctccgaaaccagcacgtattcaaaggaattccatcctcggtgcaagacacaacaccagcaatttgggcaccaggcgtctaccaagtcaaggcagttgcaagctcttggatagctcaaccggcaaaacggatacaaggtgagcatctggatctctgcctttggataatgacgaccatcgcgcacgaccgcgagatccgacaattggatatgtggttagtacgctaccacatcagcacatcgaccacaggcacagtgagcggcgcgtggatgacctaccaaatccaggacgacagctcctggagcctccaggctgccggaagcctgcagtttagctcgcgagggcaccgcctggataatgccaaatgggcactgacacccgccatgagtgccataacgacacaagccaaccccgcccaagttcttctgcgcgtggaaagcatcgaagcggcaatgccgctctcgacgcacccatgcaggccaaaggaggctttggagcaggcccttcctcataccctctacgatcaaaccctcagcagtttcttcgccatccagtggccgctgtctgaactggaagcgatcaagcatctggccaaggctacaacgacgacaacatacgagtttcaatcagctggcagtccctcgacaccaagcccaatgcggtcctacctcgagcggacagccaagaacctgcatcataccggcaaagcccgcaacgttatgaacccatacgaaaggcgacttctatacaagaccgccttaatgtatagcaggcttctataggataaaaacaccataaaaaccacaaatagaaggtcattcaccatcatccatggtcgaatgcttcgaaggcttcgaacgacatccacgatgccgcaacacggagattctcgattgctacgaccgaccgacaatatggccgagcgtaagtattgaatattgagacgataacatacttttacgatgccacacggcaagcacaccaccagctcggccatagcctcaacctcgcatcggatagactatatctactgtacgttcctctctacacgacagcgacacgttaatatcgtgctgtcctttttagtccaaggtgttatggtgtcaccgacatattcatcgtgctgtattgggctgctcgagaatctcaagactcggacatgcataacacaaaacaacaaagagaaggctgctctcccctcccctcgcgcaaggagacttcaacgacgacttttgtttcttattgtatctttgtctgatgtatctaccgccgcgagtatttatatacagctggattaacagtttggtgtatgcaacctgaggcttagcttcatggtttcggcatctcaccccgccacaaagtgtattgtgaagacgaggaagatggaggcgactaagcatctggtgatgccgcagcgcctcgcgagccttattcaagccacacagctaacaagtcatggcctgttgttagtgatcgcgatcggcgctctggaattctttctctctcacagctaatttcactccgtaccgcaagtgccgctctaacttcatccttgacatcaacgcgcatcagctcagctggaacaactcacttgactagcccagcaacgacaatggacccacgggcgtcgcctaccaacgcgtcgttgtacaatatcggtgatattctgaatctgcctgcatcgatggacctgctcgacgacgacgacttcgagagcaccatgatgctgctggacaaccccgggtccgtgacatcttccccgacatcggctctccgaagagaaggcccggacaacctggagttgagcctgactggtctcagcgacacattcaatccgcaggcacggagtctcccctggccaccatcgctcaacactctctgaatgctgggtcggctaattccgttggaatgaactcgtgtctttcacccgacctaaaaatccgggtcagcggccgaatacccgtccctggcgacgtgtgcatcaaacaagagagcgagatgcccgacttttcgccggtcatggacgctttcctacgcgagtcgtgggatgacatcattgacccgggtacaagatctgcgcggtcgtcgttcaagtcgatgagcagttgtccgagcccgttcacgatttcaactaaccctgcacatgtcaacccgttgccattaaacttcctactccccaacccgtcgccactaggaggccaggcgttggctaaaggtatgatgccataccttgccccatcgttgccgctaccccctgcaacgtaccgcgcagtctcaaatgcgtccacatcttcgacagtgtcgtcggcttcgtccacaaagtcgaaagggacacgacgagcgaagttgtgtgtgcactcgacgagcgcagtctaacaaccggtgcaagactcacggtggtggcgctcgatgccaagtggagggctgcgataagagctcgcaaggtggaggcctgtgccgtgcacatggaggttgcaagaagtgtcgcgtgccaggctgctcaaagggaacacaacgccttggtctttgctatctgcacggtggtatccgacgttgtatcatggaaggctgcaagaagaaggaccgtggcaacggctactgcatctctcacggtggcggccggcggtgcgaggctgagaattgcaaccgctccgttcgcaaaggcaaccactttcagatgcaccaaggtcttgcagacgacacttcgtttcagatcagccgagtgcgggggctcacgtcgtcgtaattaacagatacacatcaattcacttggaatagtgtgttctaccgaattcctcgatgagctttcccacatcaccaaagggggccagctcatcgaggaatcctttaagacccaaccacttatcattggtctaaaataatcaaaatctttgggggccgcacgccgcacgcccaggccttccgaaataatcattgtattgcagatccagtacaatatttctcagtaaataacttattttttgtaaaaagcatttcttggtcaataaagtatttttacaggtaattacccctattgttttttttttacgaaaaacacttttttacgacactgtaaaaaagtgttttgctaaactcttcacgacagccaccagatagctcgtaattacgccacagggcatgccttcaagagagctgttcatctcatccactctagcgtactaccagcaccttatctaccatttctgaattcatcatgcattcgcaaacatccttcacgatcaagcaagtctgcacctacttcttcaccccgctgctcgacgagatgagcccactgagcactttcgctgctagtgtggcacagtagccaaacaagacgtcaagatgggctactcgaacctctttagccacgtgctgaagcagcaccccgactacgtggccacgctggcgaacagcggcttcaactcggggacgctggtcgtttttatcgaccagaagagccagaccgtctactgctggctggactttgtcactgagtgcaacctccctttttcgttctgcgaacacccgactgtggacaagtacacgacgatgaagcggatttgcaccgagacgctgttgaagtacgcggtcttggtgaccaaggaggtcgagattggcatcagtgcgttcatcactctctaattcggtatcatgctggacgggtggagtttccactcggagcgttacgtcgccgtattttcggttttcgagcacgaccagcgctctgagaaggttctcctggcattggctccaatcgcggatgacggtgttgaggaccagatggctgagagccacgtcgccgtcctgaccggtattctaccgtttttcaagcgggacatttccagcatcatctaccttgtagctgacaattgctctgtcaacactaggttggctgatttgcttcaggtgccgttcatcggctgcgccagccatcggctgaatttggcggtcaacgtgtacctctccgactacgagccgctgctggagcaaatgcagcaactcatgcgaaagctgcgaggactgaacaaggcgaatcgactgaggtaatttgtgctttgtgcttttttgagatcgtgatatattgtaccgatctaaattgtatttttttgcttttttgctcttttgcttttctctcaggcaaaagaccaatttgcgcccggtacttcgccaggcgactcgatggggctccacgttcaagatgctcgagcgctactttgacctacgcgacgcgctggacacggacgacgacgacaacgtatcgttgatgccgactcgccgccaagagaatcgcctgcgtgccctccgcgaccagctccgtgattttcagagctcgacaatgaagctgcaggaggtcagcaccacgcttctcgacgtgcgcgacatctttgatgcgctcgtcgagaagcatcccgttgtcgacaagcaccttgtagccgatgctgccatcgtgaaggacccagacttcgaagcggcgtgcgtgcttgcgctggcggacaaaaccgaggagctgacggaggaccagcagctcatgctgagtctgttcgagaccgtcgccgccgctaccgtaactcccagccccggagggcgaccccaaggcttcgtggaccaggtcctgtcggcgaggaagaagccgcgcacggcgcagaaaaagtttggaggggtacgctacatccctccaacttctaacgctgtcgaacgtttgttcagtgtcgcgaagcacacgctgtcgaacaaccgacagggtatgctaccggtgcaccttgaaacggtgctgttcttgaagcttaatcggcgcttctggaatgcgggtaccgtcaccaaggtggtgaacggacagtaagtcactcgatagtgatgaaggtaatgatcaatacaatactttccactccaataatatacttaactgttgccgttatcagtcataatagtttagttcttaccattgtgctagtactattgcagtattattatcggaaggcctgcgcacgccattccaaaacaaacatggggagaaggtacctcagcgccaaggacaagttgctcatcgtgctggaggctgaggctggccaagtgaagcctgttgcgcgcaaacatggtgtgcaagcagcccagatccgacgctgggccaccaaccaagctaagctgaaggccaccgtatcccgcaaccctcgggccaagacactaaacgctggacggccccgtcaggacgctgagttagaagtggagctggctgcgtggataattgagcggcgatcccactagctagctgtgtctacaaaccaggtgatagcgaaggcccttacaatcaatccaagttttcaaggtggcagccgaaaggctatgtggaagtgggtgtatccgtacttacatcgccatcgtctcagcatccgccgaaagacacgggtcggtcaaaagctcagcggacactggcaggaaatccgcaatgagtttgtggcagcagtcaacgagcgctttgagcctggaggtacattggaaggcacaccacccgcgcttcgagttaatatggacgagaccgcaatatttttcgagatgacggcggacactacgataaatgaagtcaatgcgcggaccgtctcaattcggggtagtggctctaactcccgaaggcttaccgcttgtgtgacgtgcgctcaaaatggaacgaagctccccctctttgtggtgttcaaagcgaaggctggtgcgacgattggacaaagtcttgatagactgcttccgcccggtgtttttgggtgctaaacgggtggatggatgagcggggctgtcagatttggtttgataaggtatggaaaccttatgcagcatcacatccatcgtcgatgctgatgctggacgagtttaagtgccacatacagccctcatttattcggactctcaatgacattgggacagagctggagataatacctggtggctacacctgcgtactacagccatgtgatgttggcattaacaagcccgtgaagcatggcattcgcaaccagtacaatgattgggcagttcgcaagatggatggactacaaggcggtgttagagaaccggttccagagcgggaagacattattcggtggctggtagcgtcgtgggacgcgatttccagcgctactattgccaaaacgtttgcgtcgattggatacgcagtgaaaccgagtgtacctgagccaaatgcatcggagcaagtcagcacagcagccaacacaagacgttgagacagaaggagatcatgagattcaactcacagacctactgctcgatgttaggctcgaaaatattcctctacatccgtaagcatcaaacaacgtactattcccttgttccgctcagagcgacgtcgcttttggctgttgttggacttccgtaaatcctcgaccaccgtagccatcttgttctcgtaagctgtcctctgcctcaaaagtcaaaagcctacgtggcacaattgagctcccaaacggatcacatacgccttcacagcatacgcgacgtctccgttatctgccatgactgcctcccctctaaatacgatgacatcatcgatctttagaggcttgccacagagattgtgtactgtgcagctcctccccgcgtctcctgcatcacacccgacaatatctactccagcgattgtaggcgctggactcccctcctgttcgatccaaggacgtcagtaattgtacagagcaacacgtttaaccgcacttgccattagcgcttcttcgatcgactgggagaatggcaattgagagccaaacgatctcattggctaatattatggctgggggatacagctcatcgaggaagtcccctcgaaagctgcccatcacttagtataacaaacccggttgggggatacagcttttcgaggaaaaaatgggggtacagctcatcgaggaattcggtagtttgtttttcaatctttaaaacgccgtctcgtgcttttagcaatgaacaaggtcgcgctggggacagctctccattttgcgtcctggtaccaatatgacgtacagaacaacaggcttccataccaatactgtgatagattgattacccgggtcgttcctctctgcgacaaaaactcgcatcatagatcacattttgcacatgtcgaagagctgtgctagaaaaatcttgtaaacaacgccatggtctgcccggaacagctctgtacttttggagtagactgacataacacctcaataccgaatttgttttgtagagggatacacccacgtatgggatacaggatagtattagccaatcacaattgtgtcttagattttcgtagttcgtaagaactatgtatagtatcggagagataagggactaaacgctaacgcatgacacaaaaccggtatttgtataggcacagaaggtttgtacacacacgtgtatgtagcttacatagaataacagcagggggcgccacgcgtatgggcagtggaagctgatccgaatgcactttgtggacgcccaagctcccgagtcacttgaggatatgctcagtgtacgtgtgtgttttatcgcctttgccagttgtgcatctatgctgctaactatgtactactgcggctgccgtgtaggttttcaaggcatcgtacgaagcaaaccgacaagagatcgactctcttctgctgaccgcgacgctctggaacctcgagtgtgattccgagctgctaccaactcctggtacgattgtcgacattaacaagtacatcaacctgcagctctacaacgatacgcagtgccaactcacgactcgtctgggccaacatagctgggagcagaccgatctgtaagtggatgtagtgataggctagccgcagccccgtagttacatgaaaatgcatctgattccaatcggcgcacatcggattcaaactccaattgggtacgctatgcgaccttccaccagagtccagaggattcatttccgaagtctcagcgtccagcttaggtgcgtcgcccttatacgagttatatgaagagctacctgatcacacgctaacaccttctacgtggatagataacaaagcgtcagggatctaccaactacagcaccagcgagatgcacagcttgctcaagattatccaagcaactttaccagctacgagagctgacttggaagctgtttctgctgcgtacaatgccgcgaagaatcccacggagaagcacagggacgccatgagtctgaagagaaagtttcgcagtatgtgcttagcgtcgaagcacacgcgcaccgatctagctagagctacaagatgcgttcaggaccaggctaaccagcgcagaatctctgctaggggtggcgtgatcgtacccgcatcaggccagaaaccttcgcctggaagccctggatcgacagaaactctcgctgcaccgtcgctagagcgtgcaaggccgacggctccggagggagagcaactgctattgtggttggaacagtgcatcgccctacaagggcactgcgatggacccacttcgtcaccggaactactacagctatacaggttgcgtaaggaggatcggaaggctgctcgtcgtcatcacaaggagctactgatgtacatgggtgtgctgaaggttgctctagaaggtttaacttcgacttgtagccagcaacagtagcctagcgccagtataaggatgcacattcacagtgctgaggtagcccatcacggcactggcccactaaaaaaacgcacgagccatcccgctactgtaatggctcggaaactaaataatgatacagcacccttctccacctaaaagcaactcgaaccccacattcacatatcactgttacacttcacacacacttcgcaatttgctctgtacatggctggacgaggtaagtgggcccaaggcctcggacaaggcgacaccaagcgtcatcgcataattctcgtgacaacattcaaggcatcactaggcctgcgattcggaggttggctcgccgcgccggcgtcatctgaatgtcggcactcgtataccatgaaacgcaagctgtgctgagggtctacctggccaacttgattcgcgctgcggtgacttacacagagcacggcaaccggaagacagtcaccggcatcgacgtcgtgtacttcggtccggaaaagaattaacagttaggtttttctaataaaacctcgctttattttattgggtaaaaataatagcaactatgatgtgcgaccagcactaatatgaaggtgtcgacacaacaaaaggagccagccactatcggcacaacaaaacaagccagcaacaccacaatgggacgtgccaagggcaccgccgacatacctgaggaaacgcggcaagccatcgcgctgttcctcgctgagcggtctgtgggcggccgcttgaagcgtggtgcagcgtcggcagcggcatccaggtttggttgctgccgccagcaagccaccaagattttcatgcaaaagctgttgagcctgccaaagcctcggcgagggcgaccgcccgcaagtacgtcgacggtgctcatcgcccagcgagtggcccgcattgcggccactccccaccgacggtggcagactttgggagccttggcccacgccacgaacatccccaagactaccctgctgcgctacatcagcaagaagctggtgcagcgcgtcactgttcgcgtgaagccgacgctgtcggaagaccacaagtggaagcgcttggcgtacgcgctggcgcacgtcgagcggcctattggtaacagcattaatatgaggaagtgatacgcataatgatattactaataataattggttttccctaattgatataatatgtaggtgcaaggatgtatcgactgcatcatatgtacgacatgatccatattgacgagaagtggttcaatatgtacaaggccacaaacacgttctacttgacagctaacgagacagcgccctacacttcgtcgcctaacaagcgctacataggtaaggttatgttttttgcagccgtagcgcggctgcgctttggcagtcatcgaaagtgaaaatttgatggcaagatcggcatctggccaatcgtggaagagtcggttgcgcttcgaacgtccgtcaaccgtcccaagggtactattattacgtagtgcgtaaatatgacccgctccgtctacgtgaagatgctcaagactaaggttctcccagctattcggacgaaatggccaggcatattattctgctttgttgacttactatattactactaatattaattgttggttattactaatatgattagtaggtggcaaacggcgagtaatatttatacagcaggataatgcgagccctcacgtcctcgagaaggacgaggagattgctgccgctggcaaagaggatggctgggacatcaggatgaagtgtcaaccagcgcgctcgcccgatatgaacgttttagatttgggctttttccattctattcaatcgctacagtaccaagaggaaacgtacacaatcgaccagctcatcgatgcggtagcgcgagcctaccgcactacaacgtccgacacgcttgaccactgtttcctgacccttcagaacatcatggaaacagtgatcaagcaccacggacacaacgactacaagctcttgcactacaagcagcggcgtggactctcgtcaagtgcatctccgacagcgctgacatgtgagccagctgcggtagaaagtgggattcgccatcttttgtgtggtgcacttcagtttctctaattcatagtacatcatctgataaatcatgggtctaatattgaggctggttctattggctgaaatcaatgggattcgaacactgatttgtcgtatatcaatctaaccagcaaaaaaaactcatggttcagattgctaaaacaaccgaaagggagggctatttcaacgaaactgtggggttgtatggaacaactgtttatagtactttaccataataattttagttttacgtaattccaacaaacaacgacacagcgaaaaaaaccttagaggagtcgtggagggcccccattgcgagtatggtagttagatactgtgtcgtgttaagcgctcgtaaaaaagatacctagaaagcccgcacttagagctttcgaatgcaggtttcgcagcatcaatacagagattactttttcagatatgcattggtttgtgaactgttaattcttttccggaccggagaagtacgctttgaagcgccagggggaatttctttacgggtatggtgtctaggcatatgacatgttagtaccaggcagaagttatactaagcagtacgcgaataatacaacgatgaacaattccatcctgctcagatatacactgtggcagcagtagaccttttcgaagccatgtcggttttcacgtgataaaccgacacgacgaaacattgatgtttttgtgtgacaattactatcatttcttatatttcatattatgtattttttatttatgcattttacagtgtaattaacattcaactttcacatgtgattattataataaagtaaagcaaagcaaagcaaggttcgtacaaactacgttccccccccgggcgcgcccgcccgggcgtgctaatacagcgcttgacttgttgaggaatacaccagtttcaagccagtaatttttccactctcggtcgctcagcgcgcgatcatttctgcaatggtgcgggccccaccaagtcgccctcgcctgcctggaggtcaaggaaggtgaaaaacgacgcggtcgtaccattttacactgctgcgatgaagaaggctgttgtcgagcatctgggtctacacggcaatgttcatttcactgtagaagcgttctttccgggtctacctacagagaagtatcaagggagatgagtattagtgttaagatgggttcgtcgtttaaagctctatagctgctgcggatgcttctgtcggcggcaggaacaaacggaaagctcgctctactgagcttcgatctaatgttgcggcggtagcagcgaacgagctaataagttggggtgtatcggcagccgattcgagactttgatctagctgagtagcgtgctcagatgagtaactttgataaatacatctgggcatccggtgccgattcgttttttgagcaaaattgggtgtctcgtatttactattatttgccctgagccacgctttcaacagatgcccaagctcgagctgcacgcaccgtgctggcaacacggaacaccgaaggcgaattaaaccccgccacaaccggccgatgaggcgaagcgaagggaccgaaactcgcgcagacaacgcgagcaaccgaacacgcacagacaagcaagacggcagtcaaaagcgggatgccagaagctgagcgaaaagcgctcaaaagtgcaaaagtgttactcaaggtcagcgggtctcgcagaagaaccgcgaagtgcacatttgggagagtgctgatgccaactgattttatcacagtaacattgatcacagtggagaagcagggtatcgatccctgtacctctcgcatgctaagcgagcgctctaccatttgagctacatccccaggacaacaacctacgcgctctacccaaacacaaacgctgccacgcacgcaccacaaacaccacgctgcctcagaccgacgcaacgctgccacgctatctgtccgcatgcctcgcctccccccttaacccctcactactcactctacacaccaaaatccaacgcgcaatctgcaccacaccaacccgatgcagacagactcaccgcactgcgccgcactgcgccgcaccccgaccgtcgcgagcgccagagcctcgagcgaccgccacgctttcaacagatgcccaagctcgagctgcacgcaccgtgctggcaacacggaacaccgaaggcgaattaaaccccgccacaaccggccgatgaggcgaagcgaagggaccgaaactcgcgcagacaacgcgagcaaccgaacacgcacagacaagcaagacggcagtcaaaagcgggatgccagaagctgagcgaaaagcgctcaaaagtgcaaaagtgttactcaaggtcagcgggtctcgcagaagaaccgcgaagtgcacatttgggagagtgctgatgccaactgattttatcacagtaacattgatcacagtggagaagcagggtatcgatccctgtacctctcgcatgctaagcgagcgctctaccatttgagctacatccccaggacaacaacctacgcgctctacccaaacacaaacgctgccacgcacgcaccacaaacaccacgctgcctcagaccgacgcaacgctgccacgctatctgtccgcatgcctcgcctccccccttaacccctcactactcactctacacaccaaaatccaacgcgcaatctgcaccacaccaacccgatgcagacagactcaccgcactgcgccgcaccccgaccgtcgcgagcgccagagcctcgagcgaccgccacgctttcaacagatgcccaagctcgagctgcacgcaccgtgctggcaacacggaacaccgaaggcgaattaaaccccgccacaaccggccgatgaggcgaagcgaagggaccgaaactcgcgcagacaacgcgagcaaccgaacacgcacagacaagcaagacggcagtcaaaagcgggatgccagaagctgagcgaaaagcgctcaaaagtgcaaaagtgttactcaaggtcagcgggtctcgcagaagaaccgcgaagtgcacatttgggagagtgctgatgccaactgattttatcacagtaacattgatcacagtggagaagcagggtatcgatccctgtacctctcgcatgctaagcgagcgctctaccatttgagctacatccccaggacaacaacctacgcgctctacccaaacacaaacgctgccacgcacgcaccacaaacaccacgctgcctcagaccgacgcaacgctgccacgctatctgtccgcatgcctcgcctccccccttaacccctcactactcactctacacaccaaaatccaacgcgcaatctgcaccacaccaacccgatgcagacagactcaccgcactgcgccgcactgcgccgcaccccgaccgtcgcgagcgccagagcctcgagcgaccgccacgctttcaacagatgcccaagctcgagctgcacgcaccgtgctggcaacacggaacaccgaaggcgaattaaaccccgccacaaccggccgatgaggcgaagcgaagggaccgaaactcgcgcagacaacgcgagcaaccgaacacgcacagacaagcaagacggcagtcaaaagcgggatgccagaagctgagcgaaaagcgctcaaaagtgcaaaagtgttactcaaggtcagcgggtctcgcagaagaaccgcgaagtgcacatttgggagagtgctgatgccaactgattttatcacagtaacattgatcacagtggagaagcagggtatcgatccctgtacctctcgcatgctaagcgagcgctctaccatttgagctacatccccaggacaacaacctacgcgctctacccaaacacaaacgctgccacgcacgcaccacaaacaccacgctgcctcagaccgacgcaacgctgccacgctatctgtccgcatgcctcgcctccccccttaacccctcactactcactctacacaccaaaatccaacgcgcaatctgcaccacaccaacccgatgcagacagactcaccgcactgcgccgcaccccgaccgtcgcgagcgccagagcctcgagcgaccgccacgctttcaacagatgcccaagctcgagctgcacgcaccgtgctggcaacacggaacaccgaaggcgaattaaaccccgccacaaccggccgatgaggcgaagcgaagggaccgaaactcgcgcagacaacgcgagcaaccgaacacgcacagacaagcaagacggcagtcaaaagcgggatgccagaagctgagcgaaaagcgctcaaaagtgcaaaagtgttactcaaggtcagcgggtctcgcagaagaaccgcgaagtgcacatttgggagagtgctgatgccaactgattttatcacagtaacattgatcacagtggagaagcagggtatcgatccctgtacctctcgcatgctaagcgagcgctctaccatttgagctacatccccaggacaacaacctacgcgctctacccaaacacaaacgctgccacgcacgcaccacaaacaccacgctgcctcagaccgacgcaacgctgccacgctatctgtccgcatgcctcgcctccccccttaacccctcactactcactctacacaccaaaatccaacgcgcaatctgcaccacaccaacccgatgcagacagactcaccgcactgcgccgcaccccgaccgtcgcgagcgccagagcctcgagcgaccgccacgctttcaacagatgcccaagctcgagctgcacgcaccgtgctggcaacacggaacaccgaaggcgaattaaaccccgccacaaccggccgatgaggcgaagcgaagggaccgaaactcgcgcagacaacgcgagcaaccgaacacgcacagacaagcaagacggcagtcaaaagcgggatgccagaagctgagcgaaaagcgctcaaaagtgcaaaagtgttactcaaggtcagcgggtctcgcagaagaaccgcgaagtgcacatttgggagagtgctgatgccaactgattttatcacagtaacattgatcacagtggagaagcagggtatcgatccctgtacctctcgcatgctaagcgagcgctctaccatttgagctacatccccaggacaacaacctacgcgctctacccaaacacaaacgctgccacgcacgcaccacaaacaccacgctgcctcagaccgacgcaacgctgccacgctatctgtccgcatgcctcgcctccccccttaacccctcactactcactctacacaccaaaatccaacgcgcaatctgcaccacaccaacccgatgcagacagactcaccgcactgcgcgccgcactgcgccgcaccccgaccgtcgcgagcgccagagcctcgagcgaccgccacgctttcaacagatgcccaagctcgagctgcacgcaccgtgctggcaacacggaacaccgaaggcgaattaaaccccgccacaaccggccgatgaggcgaagcgaagggaccgaaactcgcgcagacaacgcgagcaaccgaacacgcacagacaagcaagacggcagtcaaaagcgggatgccagaagctgagcgaaaagcgctcaaaagtgcaaaagtgttactcaaggtcagcgggtctcgcagaagaaccgcgaagtgcacatttgggagagtgctgatgccaactgattttatcacagtaacattgatcacagtggagaagcagggtatcgatccctgtacctctcgcatgctaagcgagcgctctaccatttgagctacatccccaggacaacaacctacgcgctctacccaaacacaaacgctgccacgcacgcaccacaaacaccacgctgcctcagaccgacgcaacgctgccacgctatctgtccgcatgcctcgcctccccccttaacccctcactactcactctacacaccaaaatccaacgcgcaatctgcaccacaccaacccgatgcagacagactcaccgcactgcgccgcaccccgaccgtcgcgagcgccagagcctcgagcgaccgccacgctttcaacagatgcccaagctcgagctgcacgcaccgtgctggcaacacggaacaccgaaggcgaattaaaccccgccacaaccggccgatgaggcgaagcgaagggaccgaaactcgcgcagacaacgcgagcaaccgaacacgcacagacaagcaagacggcagtcaaaagcgggatgccagaaggtgagcgaaaagcgctcaaaagtgcaaaagtgttactcaaggtcagcgggtctcgcagaagaaccgcgaagtgcacatttgggagagtgctgatgccaactgattttatcacagtaacattgatcacagtggagaagcagggtatcgatccctgtacctctcgcatgctaagcgagcgctctaccatttgagctacatccccaggacaacaacctacgcgctctacccaaacacaaacgctgccacgcacgcannnnnnnnnnnnnnnnnnnnnnnnnnnnnnnnnnnnnnnnnnnnnnnnnnnnnnnnnnnnnnnnnnnnnnnnnnnnnnnnnnnnnnnnnnnnnnnnnnnnctagctgagtagcgtgctcagatgagtaactttgataaatacatctgggcatccggtgccgattcgttttttgagcaaaattgggtgtctcgtatttactattatttgccctgagccacgctttcaacagatgcccaagctcgagctgcacgcaccgtgctggcaacacggaacaccgaaggcgaattaaaccccgccacaaccggccgatgaggcgaagcgaagggaccgaaactcgcgcagacaacgcgagcaaccgaacacgcacagacaagcaagacggcagtcaaaagcgggatgccagaagctgagcgaaaagcgctcaaaagtgcaaaagtgttactcaaggtcagcgggtctcgcagaagaaccgcgaagtgcacatttgggagagtgctgatgccaactgattttatcacagtaacattgatcacagtggagaagcagggtatcgatccctgtacctctcgcatgctaagcgagcgctctaccatttgagctacatccccaggacaacaacctacgcgctctacccaaacacaaacgctgccacgcacgcaccacaaacaccacgctgcctcagaccgacgcaacgctgccacgctatctgtccgcatgcctcgcctccccccttaacccctcactactcactctacacaccaaaatccaacgcgcaatctgcaccacaccaacccgatgcagacagactcaccgcactgcgccgcaccccgaccgtcgcgagcgccagagcctcgagcgaccgccacgctttcaacagatgcccaagctcgagctgcacgcaccgtgctggcaacacggaacaccgaaggcgaattaaaccccgccacaaccggccgatgaggcgaagcgaagggaccgaaactcgcgcagacaatgcgagcaaccgaacacgcacagacaagcaagacggcagtcaaaagcgggatgccagaagctgagcgaaaagcgctcaaaagtgcaaaagtgttactcaaggtcagcgggtctcgcagaagaaccgcgaagtgcacatttgggagagtgctgatgccaactgattttatcacagtaacattgatcgcagtggagaagcagggtatcgatcggctccgattgacgcaacactgatatccatgtcgacggatctacactatcaatggacaggctcgtagtgttgcccgactacaacactgctcgtttcccacaaatagtttacctgctataaaagggtcaaataaaatattttacagataaaatacgagtaaatgggtgcagtactacagttggagactcaataaaaatattagtttggatacgacggtgttgccaaaggtccctctgaacacttcttcgcatttctcgctgcaccaggccaagcctaagtggaaacgctgaccccccccaaacaagcttctgtcgcacagcaagaagactctgcccagcaagaagccgcagcacaggagggaaccgctgccagctgctaccgcgcaacaaggagacgctgctccgcgagaagctgtcgcactggaacgggccgctgccccaagaagctgccgccgcgcagcaaggagttgctgccccaaggaggaggttcaggaaggacctgccgcgcatgaaggagtcgctgacaaggagcgagccgctggctctcaagaagctgcagcgcagggaggagtcgctacccatggaggcactgcccagtaaggaagtgctgactagcaagtagctgtcgaggaaggcgtcggtactacgcaagcttgcacatccttgaacctgctggaggaccttgctgcacgtgaagcttagctggcttctgtcacacagtagtgccaacttctacaagctagattttctttaacgacgcttcaaatagttgtagagtcttcggtaaagtattaatccaagttaggctgcgctggaagtgttccctataacttgaagttgaagtcgagttcaacatgatatactaaattatctcaaactaccacttctacaagctagattttctttaacgacgcttcaaatagttgtagaatcttcggtaaagtattaatccaagttaggctgcgctggaagtgttccctacaacttgaagttgaagtcgagttcaacatgatatactaaattatctcaaactaccacttctacaagctagattttctttaacgacgcttcaaatagttgtagaatagtttgacataatttagtaaagctagaccatcattaagaaaagttttgcttgctactctcatcctcctactcaacctactgcgttgacctacaagacagattgctcagagtacgttggccactatggccaaacactagaatatctttagctgcttggatggattaatgaactatatgtatttgttttactgaattgcggatcctggttcaattatgctaatttcttagcgcctctagtccagtccgaaacccctgtgaggaaatgtaacatgcagtcgattctgtttcaaacgtagcgttttgcttcaactgaagcaagtctggtcgaatctaggaatcctcaatcgcatccgattcttggatcagttcattgagttggtcgccaatttcttgcacttcgtccatatcacttgcggctgggacaacaatggtcacgctgggagagctaataaggtgccaaagcattctaagtcgaagaacacttgtcaccgcccaagataattttccttggtagcgcccaaaagaatccaaccgggcgttgagataatgccacgccattgcggtaacaagaacaccgcaactgtctccgtcgcattgtcgtggcccattcgcaattgaaacagtccatttagggtagtcgcttgggggtgttcctgcgttcgctgaaccaccacggaatcgaattttccactctccaattgccggaagtacgacttccgcgacgcgtgacttggtttctttagtgaagtaggaatcttgcatgggatcataaagcactacttcaccagacttgacgttgatgacactcagtgtccagtgaatgttgttaacattgcaaggtgcaataaacaactcccactcgcggtccatttctaatggaatgctccacgattccagtaacaggcaaaccggatcgatgagacaggcgtttccatgttcggcgcacttctgttgtatcagcagcgagatggaggtgtccgacaaccagctggatagtggcacttcgcttaaaagctcgtcaatgcgcgaggttgcttgagtatcatcaattgcaggcatggtgacgtacgccgtcagagacgtaaatgccagtgcgttggtaatatccctagcacattccgaagctcgtttgtctggtgtggtgagactgtcgacagcctcagcttcaagagcgtcccaatcagaatcgagccacaccacagtttttttcctgttctggtacgctgtcttgcacttgtagaagtcatccatagtgtacatcaaagacctacatcaacgcacaaaatagtaagccactgcacagcacaagttccaatgtacaactcgtaaacttactcgtggtatcggggggatcccgtgattttgatctccaaaccgaactgagtaggggtgaccaaaccgatttgacgggctctccgcaacgcagcaacacatttcgtgacaagctcctcggggaaaattacactgagggttttgatagcattgctagtccctgcgaaaactttaggcgttgagcgcaggttgctcggagatacaagctgccgcggaatcaggtcgaacacctttcgtgccttcgaatcatcggtacacctccgaagccactctgtcgcagcacctacagcagggccttgcatccagcaagacacatctaaagatgtggccgaccgagcggcgagcgtttttgcctgtgtctttttgcgacggagatgattctttcctccagtgtgaattgattttggcagctccagtttgatgcatgtaatggcaggggtagcgcgtaagtatgcttcgtccaacttctcgacgcgtaggctagatttcatggcaggtgacggctctgaagctggtggcccggtagtagttccttggggcgcagaatagacaggtaaatttgccgctggcaggtgtttcctgcgaggattcatgccttgcgtgccatggttacgcgcgtggaaactggctgaaggctctgcgaaatttatttctgcagagctatcgtcgctgccagaatcatcatggtcttctttttccatgtccgaactcaactccacaccagtgtccactttttggaggccgacaagaagctcattgcacgctagcgtgaccagattcagcttctgataaaatcgggaagacgaagtagctactaggacgtctacgaccggctccaatagagccttcgcaatgttgtacttctccgtatcacttttcactaggtcccgattacccacgggctcgtgcgctttcagtttcacaaacttcaactgcgggcgtcttacaatctccagtgacgcgagcttacgtccgacaccattgcctccctcctttctgttagcactggtcgtagtgttcgaccgcaccagtcgattgtgcgttaagctggccctcaaaacctccagcaacacatttgcatttgcgtagttccatctttccatgagtgcacttgccgggaatactgtttggttctggacatcaaacacgacgtggaatatgtgcatgcacggcagcctgctcgtgacaaacccgggacagctacacgcaagaaccggcagacctccaacctgccaagttacgctgtgggtaatcagcccaaccttcacgacgctgcaggttcctgtcgttccggcagtctttatttgcgctgatgtcttcttttcctcatagcgaagatattcgtcgtgaattttctggaaggcgaagtcgcttgttatatttccgaccacttgaatagcttttggaatcctcgggttgaacgtcgatgtaagctgacggcgaataagatctgcccgaagctcccccatggacgcattttgatagagaagaattccagatatgcactggtcaatagtgcatgtcaggtctaccagccgcttcatttggttccatgacgcttccagtcggtttgtcgtcgtgttcgttgccgtgaagtagtttgaccgtgcatgggtagggtagcccacatgctgcagtaatcgtaccaattggtcttcaagtaacttaagaactccacagaaatcttgttgcacagttcctccatttgtcgctgacgtcgttcaaaagactccctcgttctagcaaataccaatcctttccatgctacctccagtttttctctattcgagactgagatgttcatcttccgggttgcaagcttcttttttaccgcggtcaacgcgtgaaattgacacaacagtacctgcagtcgagaaatgcagcaacaaggtcagttttggtttgtaacccatggcgccgtagtaattttgcttaccttagcctcaggatatatttcctcgagtacatcccattcttggaagtctttgtcaataacgaatgtctccgtaatatttgcaccaacgtggtccttgaaaaattgcacgcactggcgcatcgtctcctttttttggtcggccacgatcatctcacacacggaaagccctttgccatgtcctcccgttaccatcagctcacctaaatgccagccgaggtgattggtgcggtgcgtccaatctaagaggaggcactcgccccaacgctggtaatgcagcttctgcgcctgattgatcagcgccacaccgcatacaacatcatctgacgccttcagaacaagacagtcgttgccttctttctccacaaacttctccaatacgcgagcaagacgctgctcagcggtagcaccaccatatcgagctgcacaaaaattcctgacttgttgatgtgaaacatcacgacctgagcccaatcataccaaaaattagattgatctttgccagacacgggtaattttatagacttaccaatttcagatgaaatgtattctgctcataggaactttcgtttgtcgcagcaggtcgatagatgctccgaggtcttcgctgtgaatggccttgttcaaattgatgcgatcataaatgtcttggttgatggggtggttgtgcgtggcagtctgaaaaaaataattaaattccaagatcacaaaagtcgcgtcagtaaaaaataacccaatcagtcacttaagacaatggtctttaagcataaacaaacctcgctaacgacaacaataccgagtttgccacctatcttcgtgacaaccaaagtaacacgagcctggcaccccgtataacgatagtgcagctgatcacggaccccaccacctctaggggcatcgaagcacccgtgtgtgcagtagtactggcgccgcgcatcaatgaacttgtctgttggaatttggaacttcacgtaagtccacttgttctcacgaagactgtacattcacacccacacatttagatattatcattgatagagcccattcacgcaacttacagtgcgttgtttctcgtgcttttgagcgatgtgcgcttgcggtaatggagcaagttgcgagtttcgtattcttcccaaaaactctcgaactcgctccacgttgagaagaagtggcccactcccaaagcctcgacttccaccatagtgctgcttcttccttccagcaccagttcgcgggcagctttgttcttggttcgcctcagacgcttcttcacagctgttacaatatattgatcagcatcgtttacagtgtagtacattaagaaaaaaacactggtgaatgcaacgctgaactaatagctgacatctattagctgtacatgtacctcgagcctgggcagcatggcgtttgcgtctctttcgcgtatcggcaccgctaccgtctcgcctgtctgtagcttggcctgtctggtttggcggttgtgtgcttgtaaatgctgtaaactcgagccataactccgaaaaagggtcaggcccaggggggcctaatgtgcattaaagatgatactagagtctagagaaaacgcacaccgcaagcacaacgtagccacataaactccggttaccatcgcctccatacggccacaacttccgcatttccgctttcaattcgagaatggcagtattgcgccgcgtggcggctaggctcccagaaggccgtaatcttgttttcccattgtcaaatctcggggccttttcttacttatagtagtttacggctgtagtggtgctggtcgacctggttgtcagtgttgctttaatgacttccgtatcgatccctgtacctctcgtatgctaagcgagcgctctaccatttgagctacatccccaggacaacaaccttcgcgctctacccaaacacaaacgctgccacgcacgcaccacaaacaccgcgctggcttagaccgacgcacgaactcgtggtgcttgggaacccgttgatactcttggaaattgtgttgcactgggagatcgttgtacactccgagctgatggggctcatgtagttggttgtgggcatgggcttggtcgtgctcgtggggcttgcggacgtgttggtgctcacggagctcgtggcgcactcggagatcgtgctgctctcgaagcttgtggcgctctcggactcagtattttttcacagcggttccctctcctgtggctgcccgagacgctgcccgacgcgttagaggtcacgaccaccgtcaagcgcaccaacatgatcatgggcgtgcggcactagcagcacaagggcgagggctggcagttccacccagggagcatactcacggacgacggcctcaagctcatccagaacttccttgacatgtgaacgatccagcccccacgagggagtggtaccggatggccttgaaatcgggcgtcatgcgcttgaacaggctcttgccgtcgtgcaccatgacgggcgccttgccgtgcgcgatgtcacgtggcctatcttgccgccgaggacctcacgtacgacgtggttcagacttgcaccatcatgtcgccgtctccatgtgggctcgcatgatctcacctggctcaagcgtaagcgtctcagcctcatttacgtcggcggctaggcatgtagacatggcagcagggatccggaaagctgggtgttgtctgacatattgtagccgtcggtgtttggtgtcgaatagtcccgatgagaggcttgatcacctccccctggcttggaccaaagaacgaccacgttccttacgctggcttcggggaagtacggcttgaagaatgggtccagctcggccttgagctcttcagctaatcggcgacagagcagggcttgaaggcggaacgcgtcctcaacacctgcaccacggaaaaccgggtgaaacgagtctctttcttccttgttcatccgttgaacctcctttcgcagacgcgtctgaaggcgctccgacagcgaatggagcacagtgtagcctttcacgtttatccgatccatcgcagtttcaagaatgaacgggcacttacccaatcagttcgcaccaaataaaatctataattactaaagtagtctaatagtgagctacaatgtcgaccagccagcgaactgaccgcatgttatgtcgcataataactgtcgctacttttttctcatattgggctacagtggcgccagttattacatgtatgagaaaaatttgcgccgagcaaaagtggtgccagattacatataactgacgttacttttgcacgacgcgaattttctcataataactggcgccactgttgtcctggcgccactttagcgaagcataactggcgccacattttatctaactgttgtagtagccaacgggaacactaaagatcgcgagaagatcacatcgcgaaacggaatacaattcattttattcatatggatcttgttttatcatatagctgtagcactgaaggtgtggtgtagcgggatcagcaaaatctgcgagattgccaatccaacttcccaactgcgcccgaacaccgacttacggagggggtcccccgatgatccgtgatctgtgtgctgaactggtcaccttgtgtacccgtcggtagggctggatctgcattggtgtcttccgaagcgtccgagccttgaagagagaacagtctgggcgagacgcggggatgtgggtggagcagcgtggaaaacttcactctgctcgcagtagtattccaaatccagtggtcttgtacttggatctggcggcctggatctggatccggccgggttgttgcctttcgaggttgttgtcctttacgttgccttcgcaggtcttccttaatcgtgtttgccgcctccattgacggtgtcgttgacagttgagacgagaaggacgcaccggccaaacagataactccggtggatcttggatctgcacttgcaggtagttcactgggaaggtcttggatctggccaatatattactccagtcttacaaccaacactagatctgctaccgctaacctctctacgctgtgtagggccaatgtcgttcccgtttccaggcgagggaggaagcaattgcgttgtacaaggcaaattctggtctttggggggggggggggggagataccgcttgtggacgcttggtagccttggacgtcgtgtggggccaaatccaatctccacagcgcgagtcgtgcggggccaatatgtgcttccccgtcgagccgtccggaccacttgagctcttccaggcaaattcgggtctgatttatgcttaagttcgttcctatcccaaaatcctatcgccatgtggatcctatcaccccatccgtacttaccgactctatggaccctctttaccttcattgcgtgtcagctgcttgcccgtcgagtcgtgtccaccactccacgattacgctgggatgtcgaattgaacccatcttggatctggatcacatgggtacagatccagatccatctgagtccagatccagatccatctgagtccagatccgtcacctgtctcatccactgccataactcttttccgggaattgcgcttctccacaatcgcttcctgaccgtagttgccgccgcccaacggcgtcactgcgggcacagctgcccactttttcgcctccccagtttcgcagacatgtccggccccggccgcagcccctcccgggcctcgtcaagcgcgcagcgatcgtcacacggatcggccttcaccggatccacccggtccagatcctcgctacgcgctctaatcgcctcctgtgatgctgcagttcgcaaccaagaagaggtcgctgctctactgctgcaccagacgggggagctggacgcggctcaagcgtacatacagcagcagaacgcagagctgagcagcttgcgatcggaagtcgctgtccatcgcagccggggagctacctctgcggctggcgtggcgcgggctctccaactccagggccaagtcgaccaacaggtgaacgagatccgggatctccggcgtcgcatcgagcaaattatgcgtgaacaggatcgcttgcaggagaacaacgaccacctggcttccgaggtcagcttggccaccgccgagatccagcagcttcaggatcaaaacaccgatctggatcgcgatttagaagacgccaactacgagcgggacatagctgagcacaacatggatcgagcgcaggaggagctcttaagggtcgaggccgagctccaaacaggcgatcgaattacttcggcggatctgcaacagattacgaccctaacgcaggaacgggatcgcgctcgcacatcattggccgaggtatcccacgaaggcgcgagaagacctgcttgcccaccagcggatgcacacggaggctcgtgacgaggtgaatcgcctgcgggctacccacagagctaccatggcggatctggaccaagctgtgcgggaacgtgacaacccggagctgactcgtctgcgggatctccaggagacgactgtcgcggatctggcgcaggtatgccgggagcgggacgcccttcaaggtgaggtgaaccaagttcgttcggagttccatgatctccaatccgacttcgatgcgtccaagcagaccgtgactgcaatggggcgccggattcaggcgatcgaatctgaaagtcggttgctgacgcaggatctgatccggatgagccatgagcgggacgtgctacagcaggagctctcagtcgcgcgttgacagttgacctccatcaccactctggtgagagcgcgacctggtgcaatcgaagaggttctggatccggcctacatcctcagcttgatccgtattgcgccccctggatctgccgagaagcagcctgctggcgaaacttccgaccccgctcagcgggatcccgatccagaggcgaacccagagttgagtcgtcaagtaggctctggcacttcgaaacgggatcgtgacccggagactcccgatccagatccaactctggccgtcaagcgtcgcattttctcgccgtcctccgagcatgatgaagccatggaccaggagggtaaccgcgcagctttcggcgctgccacagagggagagatcgacgacgatgggggcggtaaccaggaggaggaggcggagcatgcacacacgttggtttcggccgactatcacccttggctggtggatcgcctgaacgacgtggccatggtatctatgctgatcgacgcgttgttcccgatccttcccactgctccaggctgtttatttccctacttcggccctgcccagggccgtaagccgaagatccaactcagtgactactgctgggaactcaacacagaagagaacgtgcgggcgctattggacactcacccttgggaaatccttgagaacccgggcgatgccatttcgttcgaagtcactgtgggtggtcgacttgggatcctgatccaggagtacgggatcttcgaagacactaacctcatgtcctactgggaatcgacccaccacttcccgatccccgatacgatggcaaagaaatatccgtggctgctaggaacgcagtaaccgtaaatcccacgcgggccgtgcgtggaagcagttcttggagttgttgatcaccgtcatgcgtgaagggtggtgtgacctggacatcctgttggatccacattccctacatttccccaagcgcgccgagtccgtcacgtggtacccagggttggcctcgcgccaggctaatttggcggatcgtaactcaaaccggccagagcccacggatctcttggaggcgttggatgagtgtaacaacgaggatccatggcgcaaccactaccgggatactccccaataccatcctgcgcgcaacattgcgcgcctcccggccaagttcttcaatctccgtgcagttggcgaccagtatgggctggatccacggtgccagatctcaagtagatccagatccacagatccttgcagttgagctaattacgcaggatctggatgtacttctgcatgttatagccagcgatcatccactcgtttcacttgcgttcctgccttctctttcgtttccgatccgactccgctcctcatgtcacgccacccagtctgcctctcactaccccgatccacctttgcactccaatacagcctgagcctgtagatccggatccatgccacacctctttgcgatccagatccataattacactccactccaaatccagctaaggcgtccttgccacctccagattattctttcttccacccccctcgagtgcaacgaacaccttgctactccatacacaaatacaaaattcccaatccaccgatctgcaaccaccttgcagatccctcaccacactctctacccaaagtgacaaactcactccaggagaccgcagccctcactactcctcgtgggactgcatcacaccgaaccggttccggttagtgcggctccgcagaaactcatgtagtatagcgccacagttgagatccgcttcatccacccaggatggatcttcatatccgcgccagtgtaccaagaattcacgatgggtccggccgtaacgagtgcgtttcccagttctcatgtcagtaattttgtccacttcgtactcgtcttcacctagatcctggatccagctgtcctccggcagtaatgcttcatcaaagtcgtatcgctccgtagtgccttcggtcaactggatctggggtcggtctgggaaattcctcacaagcttcaacttggaaacatgtaccacagggaacagccgatattctgtgccagggatctcgatccgcacagcgtattctcccatcttttccgccacccggaacggaccgtgccacatgtgagccaacttgcgcgcgtatccttccttcacccgatccaattacaaccaaactctggatcccactccaatctggtgcggacggatctcttcattatgccggtccgcccgatccgagatcgcctcttgcagtcgcgcgctgacttctgcccgtgcctgctgataatagcgttggatctggtatcgccaccgcctcggatcccgatcctgacggcgagtgctgcccaccgggatcgtagcctcgagcgtggatctaggatcccagccatgtaccaagtagaatggcgtctctcctcggatccgatcctgggcggtgttgagtgcgaaggtgagacgctcagcgtagtcgtcccaatcgcgctgatccagatcctgcacgtacatcttcagagcgcgagtggcagtttgcaccatgcgcccagcggttccgtttgcttgcgacctgtacgccatcgtcgctcgttgtcgctgaccaaggatcttgttgaaggatctaaagaagtcggccatgaaccccggctcgcggtcgtggcgaatcacctcgctggcacctaatcgtctgaatacacactcttcgtaggattccgcgatcgtctgcgccgtcctggagttactggccttcgcgatcacgtacccggtgaacatatccacccagatcagtaactcggtattacctttgttggatctgggcagcgacggtatgtgatccatcgctataatctgaaacgggtacgtggcttggatgttaccgggcgactcaccttggatcgctggtcgccctttgccggtttcacaatccacgcattctccgacgtatcgctgtacactccgatataatcctctccagtggaagcgatcccggatccgttggtaggtgcggccgatcccttggtgacctccttcgagactgacatggtaatggtggagaacatcctgttgtagagtctccggcagcaccatcctcatcaattcatcgcgatccgcctccaccttcttcgcaggaggacaatagaacagcaagtcgttgaggtccacttcgtaatccatcgcgacagcactataggatctcgcctcatcttgggtcagatcctgcatgtcgcccgctaagtacttcttcagaccggagatccacgcctcctcgtcctgcgcttggcgaatcctagcgaccctgatgtcccgcactatcttcccgtaagacagtagggctggatctggatctggcatgtgatcgggttatcacaggtgatacacgagcgacgggggcatcttcttcactcttcacaaccaggatttcctccagtcgattcagcgtgatcagatcctgtagatccacctcgtcctccaacatgatcccggcttgccgttgaagtgctgcactggctaggctatccgcgctgccgttccagtcgcgcttgacatgtaccagctcgtggtccggccagatccgcagccgatccagggctttctgtctcagaagggtcaatcctggcgccttgcagtcgatctcacctcggacttggcgaaccaccaggttggaatctccacagatcaccaatcgtcgttgtgcctcgccttcgagcagatccaaacatannnnnnnnnnnnnnnnnnnnnnnnnnnnnnnnnnnnnnnnnnnnnnnnnnnnnnnnnnnnnnnnnnnnnnnnnnnnnnnnnnnnnnnnnnnnnnnnnnnnnnnnnnnnnnnnnnnnnnnnnnnnnnnnnnnnnnnnnnnnnnnnnnnnnnnnnnnnnnnnnnnnnnnnnnnnnnnnnnnnnnnnnnnnnnnnnnnnnnnnnnnnnnnnnnnnnnnnnnnnnnnnnnnnnnnnnnnnnnnnnnnnnnnnnnnnnnnnnnnnnnnnnnnnnnnnnnnnnnnnnnnnnnnnnnnnnnnnnnnnnnnnnnnnnnnnnnnnnnnnnnnnnnnnnnnnnnnnnnnnnnnnnnnnnnnnnnnnnnnnnnnnnnnnnnnnnnnnnnnnnnnnnnnnnnnnnnnnnnnnnnnnnnnnnnnnnnnnnnnnnnnnnnnnnnnnnnnnnnnnnnnnnnnnnnnnnnnnnnnnnnnnnnnnnnnnnnnnnnnnnnnnnnnnnnnnnnnnnnnnnnnnnnnnnnnnnnnnnnnnnnnnnnnnnnnnnnnnnnnnnnnnnnnnnnnnnnnnnnnnnnnnnnnnnnnnnnnnnnnnnnnnnnnnnnnnnnnnnnnnnnnnnnnnnnnnnnnnnnnnnnnnnnnnnnnnnnnnnnnnnnnnnnnnnnnnnnnnnnnnnnnnnnnnnnnnnnnnnnnnnnnnnnnnnnnnnnnnnnnnnnnnnnnnnnnnnnnnnnnnnnnnnnnnnnnnnnnnnnnnnnnnnnnnnnnnnnnnnnnnnnnnnnnnnnnnnnnnnnnnnnnnnnnnnnnnnnnnnnnnnnnnnnnnnnnnnnnnnnnnnnnnnnnnnnnnnnnnnnnnnnnnnnnnnnnnnnnnnnnnnnnnnnnnnnnnnnnnnnnnnnnnnnnnnnnnnnnnnnnnnnnnnnnnnnnnnnnnnnnnnnnnnnnnnnnnnnnnnnnnnnnnnnnnnnnnnnnnnnnnnnnnnnnnnnnnnnnnnnnnnnnnnnnnnnnnnnnnnnnnnnnnnnnnnnnnnnnnnnnnnnnnnnnnnnnnnnnnnnnnnnnnnnnnnnnnnnnnnnnnnnnnnnnnnnnnnnnnnnnnnnnnnnnnnnnnnnnnnnnnnnnnnnnnnnnnnnnnnnnnnnnnnnnnnnnnnnnnnnnnnnnnnnnnnnnnnnnnnnnnnnnnnnnnnnnnnnnnnnnnnnnnnnnnnnnnnnnnnnnnnnnnnnnnnnnnnnnnnnnnnnnnnnnnnnnnnnnnnnnnnnnnnnnnnnnnnnnnnnnnnnnnnnnnnnnnnnnnnnnnnnnnnnnnnnnnnnnnnnnnnnnnnnnnnnnnnnnnnnnnnnnnnnnnnnnnnnnnnnnnnnnnnnnnnnnnnnnnnnnnnnnnnnnnnnnnnnnnnnnnnnnnnnnnnnnnnnnnnnnnnnnnnnnnnnnnnnnnnnnnnnnnnnnnnnnnnnnnnnnnnnnnnnnnnnnnnnnnnnnnnnnnnnnnnnnnnnnnnnnnnnnnnnnnnnnnnnnnnnnnnnnnnnnnnnnnnnnnnnnnnnnnnnnnnnnnnnnnnnnnnnnnnnnnnnnnnnnnnnnnnnnnnnnnnnnnnnnnnnnnnnnnnnnnnnnnnnnnnnnnnnnnnnnnnnnnnnnnnnnnnnnnnnnnnnnnnnnnnnnnnnnnnnnnnnnnnnnnnnnnnnnnnnnnnnnnnnnnnnnnnnnnnnnnnnnnnnnnnnnnnnnnnnnnnnnnnnnnnnnnnnnnnnnnnnnnnnnnnnnnnnnnnnnnnnnnnnnnnnnnnnnnnnnnnnnnnnnnnnnnnnnnnnnnnnnnnnnnnnnnnnnnnnnnnnnnnnnnnnnnnnnnnnnnnnnnnnnnnnnnnnnnnnnnnnnnnnnnnnnnnnnnnnnnnnnnnnnnnnnnnnnnnnnnnnnnnnnnnnnnnnnnnnnnnnnnnnnnnnnnnnnnnnnnnnnnnnnnnnnnnnnnnnnnnnnnnnnnnnnnnnnnnnnnnnnnnnnnnnnnnnnnnnnnnnnnnnnnnnnnnnnnnnnnnnnnnnnnnnnnnnnnnnnnnnnnnnnnnnnnnnnnnnnnnnnnnnnnnnnnnnnnnnnnnnnnnnnnnnnnnnnnnnnnnnnnnnnnnnnnnnnnnnnnnnnnnnnnnnnnnnnnnnnnnnnnnnnnnnnnnnnnnnnnnnnnnnnnnnnnnnnnnnnnnnnnnnnnnnnnnnnnnnnnnnnnnnnnnnnnnnnnnnnnnnnnnnnnnnnnnnnnnnnnnnnnnnnnnnnnnnnnnnnnnnnnnnnnnnnnnnnnnnnnnnnnnnnnnnnnnnnnnnnnnnnnnnnnnnnnnnnnnnnnnnnnnnnnnnnnnnnnnnnnnnnnnnnnnnnnnnnnnnnnnnnnnnnnnnnnnnnnnnnnnnnnnnnnnnnnnnnnnnnnnnnnnnnnnnnnnnnnnnnnnnnnnnnnnnnnnnnnnnnnnnnnnnnnnnnnnnnnnnnnnnnnnnnnnnnnnnnnnnnnnnnnnnnnnnnnnnnnnnnnnnnnnnnnnnnnnnnnnnnnnnnnnnnnnnnnnnnnnnnnnnnnnnnnnnnnnnnnnnnnnnnnnnnnnnnnnnnnnnnnnnnnnnnnnnnnnnnnnnnnnnnnnnnnnnnnnnnnnnnnnnnnnnnnnnnnnnnnnnnnnnnnnnnnnnnnnnnnnnnnnnnnnnnnnnnnnnnnnnnnnnnnnnnnnnnnnnnnnnnnnnnnnnnnnnnnnnnnnnnnnnnnnnnnnnnnnnnnnnnnnnnnnnnnnnnnnnnnnnnnnnnnnnnnnnnnnnnnnnnnnnnnnnnnnnnnnnnnnnnnnnnnnnnnnnnnnnnnnnnnnnnnnnnnnnnnnnnnnnnnnnnnnnnnnnnnnnnnnnnnnnnnnnnnnnnnnnnnnnnnnnnnnnnnnnnnnnnnnnnnnnnnnnnnnnnnnnnnnnnnnnnnnnnnnnnnnnnnnnnnnnnnnnnnnnnnnnnnnnnnnnnnnnnnnnnnnnnnnnnnnnnnnnnnnnnnnnnnnnnnnnnnnnnnnnnnnnnnnnnnnnnnnnnnnnnnnnnnnnnnnnnnnnnnnnnnnnnnnnnnnnnnnnnnnnnnnnnnnnnnnnnnnnnnnnnnnnnnnnnnnnnnnnnnnnnnnnnnnnnnnnnnnnnnnnnnnnnnnnnnnnnnnnnnnnnnnnnnnnnnnnnnnnnnnnnnnnnnnnnnnnnnnnnnnnnnnnnnnnnnnnnnnnnnnnnnnnnnnnnnnnnnnnnnnnnnnnnnnnnnnnnnnnnnnnnnnnnnnnnnnnnnnnnnnnnnnnnnnnnnnnnnnnnnnnnnnnnnnnnnnnnnnnnnnnnnnnnnnnnnnnnnnnnnnnnnnnnnnnnnnnnnnnnnnnnnnnnnnnnnnnnnnnnnnnnnnnnnnnnnnnnnnnnnnnnnnnnnnnnnnnnnnnnnnnnnnnnnnnnnnnnnnnnnnnnnnnnnnnnnnnnnnnnnnnnnnnnnnnnnnnnnnnnnnnnnnnnnnnnnnnnnnnnnnnnnnnnnnnnnnnnnnnnnnnnnnnnnnnnnnnnnnnnnnnnnnnnnnnnnnnnnnnnnnnnnnnnnnnnnnnnnnnnnnnnnnnnnnnnnnnnnnnnnnnnnnnnnnnnnnnnnnnnnnnnnnnnnnnnnnnnnnnnnnnnnnnnnnnnnnnnnnnnnnnnnnnnnnnnnnnnnnnnnnnnnnnnnnnnnnnnnnnnnnnnnnnnnnnnnnnnnnnnnnnnnnnnnnnnnnnnnnnnnnnnnnnnnnnnnnnnnnnnnnnnnnnnnnnnnnnnnnnnnnnnnnnnnnnnnnnnnnnnnnnnnnnnnnnnnnnnnnnnnnnnnnnnnnnnnnnnnnnnnnnnnnnnnnnnnnnnnnnnnnnnnnnnnnnnnnnnnnnnnnnnnnnnnnnnnnnnnnnnnnnnnnnnnnnnnnnnnnnnnnnnnnnnnnnnnnnnnnnnnnnnnnnnnnnnnnnnnnnnnnnnnnnnnnnnnnnnnnnnnnnnnnnnnnnnnnnnnnnnnnnnnnnnnnnnnnnnnnnnnnnnnnnnnnnnnnnnnnnnnnnnnnnnnnnnnnnnnnnnnnnnnnnnnnnnnnnnnnnnnnnnnnnnnnnnnnnnnnnnnnnnnnnnnnnnnnnnnnnnnnnnnnnnnnnnnnnnnnnnnnnnnnnnnnnnnnnnnnnnnnnnnnnnnnnnnnnnnnnnnnnnnnnnnnnnnnnnnnnnnnnnnnnnnnnnnnnnnnnnnnnnnnnnnnnnnnnnnnnnnnnnnnnnnnnnnnnnnnnnnnnnnnnnnnnnnnnnnnnnnnnnnnnnnnnnnnnnnnnnnnnnnnnnnnnnnnnnnnnnnnnnnnnnnnnnnnnnnnnnnnnnnnnnnnnnnnnnnnnnnnnnnnnnnnnnnnnnnnnnnnnnnnnnnnnnnnnnnnnnnnnnnnnnnnnnnnnnnnnnnnnnnnnnnnnnnnnnnnnnnnnnnnnnnnnnnnnnnnnnnnnnnnnnnnnnnnnnnnnnnnnnnnnnnnnnnnnnnnnnnnnnnnnnnnnnnnnnnnnnnnnnnnnnnnnnnnnnnnnnnnnnnnnnnnnnnnnnnnnnnnnnnnnnnnnnnnnnnnnnnnnnnnnnnnnnnnnnnnnnnnnnnnnnnnnnnnnnnnnnnnnnnnnnnnnnnnnnnnnnnnnnnnnnnnnnnnnnnnnnnnnnnnnnnnnnnnnnnnnnnnnnnnnnnnnnnnnnnnnnnnnnnnnnnnnnnnnnnnnnnnnnnnnnnnnnnnnnnnnnnnnnnnnnnnnnnnnnnnnnnnnnnnnnnnnnnnnnnnnnnnnnnnnnnnnnnnnnnnnnnnnnnnnnnnnnnnnnnnnnnnnnnnnnnnnnnnnnnnnnnnnnnnnnnnnnnnnnnnnnnnnnnnnnnnnnnnnnnnnnnnnnnnnnnnnnnnnnnnnnnnnnnnnnnnnnnnnnnnnnnnnnnnnnnnnnnnnnnnnnnnnnnnnnnnnnnnnnnnnnnnnnnnnnnnnnnnnnnnnnnnnnnnnnnnnnnnnnnnnnnnnnnnnnnnnnnnnnnnnnnnnnnnnnnnnnnnnnnnnnnnnnnnnnnnnnnnnnnnnnnnnnnnnnnnnnnnnnnnnnnnnnnnnnnnnnnnnnnnnnnnnnnnnnnnnnnnnnnnnnnnnnnnnnnnnnnnnnnnnnnnnnnnnnnnnnnnnnnnnnnnnnnnnnnnnnnnnnnnnnnnnnnnnnnnnnnnnnnnnnnnnnnnnnnnnnnnnnnnnnnnnnnnnnnnnnnnnnnnnnnnnnnnnnnnnnnnnnnnnnnnnnnnnnnnnnnnnnnnnnnnnnnnnnnnnnnnnnnnnnnnnnnnnnnnnnnnnnnnnnnnnnnnnnnnnnnnnnnnnnnnnnnnnnnnnnnnnnnnnnnnnnnnnnnnnnnnnnnnnnnnnnnnnnnnnnnnnnnnnnnnnnnnnnnnnnnnnnnnnnnnnnnnnnnnnnnnnnnnnnnnnnnnnnnnnnnnnnnnnnnnnnnnnnnnnnnnnnnnnnnnnnnnnnnnnnnnnnnnnnnnnnnnnnnnnnnnnnnnnnnnnnnnnnnnnnnnnnnnnnnnnnnnnnnnnnnnnnnnnnnnnnnnnnnnnnnnnnnnnnnnnnnnnnnnnnnnnnnnnnnnnnnnnnnnnnnnnnnnnnnnnnnnnnnnnnnnnnnnnnnnnnnnnnnnnnnnnnnnnnnnnnnnnnnnnnnnnnnnnnnnnnnnnnnnnnnnnnnnnnnnnnnnnnnnnnnnnnnnnnnnnnnnnnnnnnnnnnnnnnnnnnnnnnnnnnnnnnnnnnnnnnnnnnnnnnnnnnnnnnnnnnnnnnnnnnnnnnnnnnnnnnnnnnnnnnnnnnnnnnnnnnnnnnnnnnnnnnnnnnnnnnnnnnnnnnnnnnnnnnnnnnnnnnnnnnnnnnnnnnnnnnnnnnnnnnnnnnnnnnnnnnnnnnnnnnnnnnnnnnnnnnnnnnnnnnnnnnnnnnnnnnnnnnnnnnnnnnnnnnnnnnnnnnnnnnnnnnnnnnnnnnnnnnnnnnnnnnnnnnnnnnnnnnnnnnnnnnnnnnnnnnnnnnnnnnnnnnnnnnnnnnnnnnnnnnnnnnnnnnnnnnnnnnnnnnnnnnnnnnnnnnnnnnnnnnnnnnnnnnnnnnnnnnnnnnnnnnnnnnnnnnnnnnnnnnnnnnnnnnnnnnnnnnnnnnnnnnnnnnnnnnnnnnnnnnnnnnnnnnnnnnnnnnnnnnnnnnnnnnnnnnnnnnnnnnnnnnnnnnnnnnnnnnnnnnnnnnnnnnnnnnnnnnnnnnnnnnnnnnnnnnnnnnnnnnnnnnnnnnnnnnnnnnnnnnnnnnnnnnnnnnnnnnnnnnnnnnnnnnnnnnnnnnnnnnnnnnnnnnnnnnnnnnnnnnnnnnnnnnnnnnnnnnnnnnnnnnnnnnnnnnnnnnnnnnnnnnnnnnnnnnnnnnnnnnnnnnnnnnnnnnnnnnnnnnnnnnnnnnnnnnnnnnnnnnnnnnnnnnnnnnnnnnnnnnnnnnnnnnnnnnnnnnnnnnnnnnnnnnnnnnnnnnnnnnnnnnnnnnnnnnnnnnnnnnnnnnnnnnnnnnnnnnnnnnnnnnnnnnnnnnnnnnnnnnnnnnnnnnnnnnnnnnnnnnnnnnnnnnnnnnnnnnnnnnnnnnnnnnnnnnnnnnnnnnnnnnnnnnnnnnnnnnnnnnnnnnnnnnnnnnnnnnnnnnnnnnnnnnnnnnnnnnnnnnnnnnnnnnnnnnnnnnnnnnnnnnnnnnnnnnnnnnnnnnnnnnnnnnnnnnnnnnnnnnnnnnnnnnnnnnnnnnnnnnnnnnnnnnnnnnnnnnnnnnnnnnnnnnnnnnnnnnnnnnnnnnnnnnnnnnnnnnnnnnnnnnnnnnnnnnnnnnnnnnnnnnnnnnnnnnnnnnnnnnnnnnnnnnnnnnnnnnnnnnnnnnnnnnnnnnnnnnnnnnnnnnnnnnnnnnnnnnnnnnnnnnnnnnnnnnnnnnnnnnnnnnnnnnnnnnnnnnnnnnnnnnnnnnnnnnnnnnnnnnnnnnnnnnnnnnnnnnnnnnnnnnnnnnnnnnnnnnnnnnnnnnnnnnnnnnnnnnnnnnnnnnnnnnnnnnnnnnnnnnnnnnnnnnnnnnnnnnnnnnnnnnnnnnnnnnnnnnnnnnnnnnnnnnnnnnnnnnnnnnnnnnnnnnnnnnnnnnnnnnnnnnnnnnnnnnnnnnnnnnnnnnnnnnnnnnnnnnnnnnnnnnnnnnnnnnnnnnnnnnnnnnnnnnnnnnnnnnnnnnnnnnnnnnnnnnnnnnnnnnnnnnnnnnnnnnnnnnnnnnnnnnnnnnnnnnnnnnnnnnnnnnnnnnnnnnnnnnnnnnnnnnnnnnnnnnnnnnnnnnnnnnnnnnnnnnnnnnnnnnnnnnnnnnnnnnnnnnnnnnnnnnnnnnnnnnnnnnnnnnnnnnnnnnnnnnnnnnnnnnnnnnnnnnnnnnnnnnnnnnnnnnnnnnnnnnnnnnnnnnnnnnnnnnnnnnnnnnnnnnnnnnnnnnnnnnnnnnnnnnnnnnnnnnnnnnnnnnnnnnnnnnnnnnnnnnnnnnnnnnnnnnnnnnnnnnnnnnnnnnnnnnnnnnnnnnnnnnnnnnnnnnnnnnnnnnnnnnnnnnnnnnnnnnnnnnnnnnnnnnnnnnnnnnnnnnnnnnnnnnnnnnnnnnnnnnnnnnnnnnnnnnnnnnnnnnnnnnnnnnnnnnnnnnnnnnnnnnnnnnnnnnnnnnnnnnnnnnnnnnnnnnnnnnnnnnnnnnnnnnnnnnnnnnnnnnnnnnnnnnnnnnnnnnnnnnnnnnnnnnnnnnnnnnnnnnnnnnnnnnnnnnnnnnnnnnnnnnnnnnnnnnnnnnnnnnnnnnnnnnnnnnnnnnnnnnnnnnnnnnnnnnnnnnnnnnnnnnnnnnnnnnnnnnnnnnnnnnnnnnnnnnnnnnnnnnnnnnnnnnnnnnnnnnnnnnnnnnnnnnnnnnnnnnnnnnnnnnnnnnnnnnnnnnnnnnnnnnnnnnnnnnnnnnnnnnnnnnnnnnnnnnnnnnnnnnnnnnnnnnnnnnnnnnnnnnnnnnnnnnnnnnnnnnnnnnnnnnnnnnnnnnnnnnnnnnnnnnnnnnnnnnnnnnnnnnnnnnnnnnnnnnnnnnnnnnnnnnnnnnnnnnnnnnnnnnnnnnnnnnnnnnnnnnnnnnnnnnnnnnnnnnnnnnnnnnnnnnnnnnnnnnnnnnnnnnnnnnnnnnnnnnnnnnnnnnnnnnnnnnnnnnnnnnnnnnnnnnnnnnnnnnnnnnnnnnnnnnnnnnnnnnnnnnnnnnnnnnnnnnnnnnnnnnnnnnnnnnnnnnnnnnnnnnnnnnnnnnnnnnnnnnnnnnnnnnnnnnnnnnnnnnnnnnnnnnnnnnnnnnnnnnnnnnnnnnnnnnnnnnnnnnnnnnnnnnnnnnnnnnnnnnnnnnnnnnnnnnnnnnnnnnnnnnnnnnnnnnnnnnnnnnnnnnnnnnnnnnnnnnnnnnnnnnnnnnnnnnnnnnnnnnnnnnnnnnnnnnnnnnnnnnnnnnnnnnnnnnnnnnnnnnnnnnnnnnnnnnnnnnnnnnnnnnnnnnnnnnnnnnnnnnnnnnnnnnnnnnnnnnnnnnnnnnnnnnnnnnnnnnnnnnnnnnnnnnnnnnnnnnnnnnnnnnnnnnnnnnnnnnnnnnnnnnnnnnnnnnnnnnnnnnnnnnnnnnnnnnnnnnnnnnnnnnnnnnnnnnnnnnnnnnnnnnnnnnnnnnnnnnnnnnnnnnnnnnnnnnnnnnnnnnnnnnnnnnnnnnnnnnnnnnnnnnnnnnnnnnnnnnnnnnnnnnnnnnnnnnnnnnnnnnnnnnnnnnnnnnnnnnnnnnnnnnnnnnnnnnnnnnnnnnnnnnnnnnnnnnnnnnnnnnnnnnnnnnnnnnnnnnnnnnnnnnnnnnnnnnnnnnnnnnnnnnnnnnnnnnnnnnnnnnnnnnnnnnnnnnnnnnnnnnnnnnnnnnnnnnnnnnnnnnnnnnnnnnnnnnnnnnnnnnnnnnnnnnnnnnnnnnnnnnnnnnnnnnnnnnnnnnnnnnnnnnnnnnnnnnnnnnnnnnnnnnnnnnnnnnnnnnnnnnnnnnnnnnnnnnnnnnnnnnnnnnnnnnnnnnnnnnnnnnnnnnnnnnnnnnnnnnnnnnnnnnnnnnnnnnnnnnnnnnnnnnnnnnnnnnnnnnnnnnnnnnnnnnnnnnnnnnnnnnnnnnnnnnnnnnnnnnnnnnnnnnnnnnnnnnnnnnnnnnnnnnnnnnnnnnnnnnnnnnnnnnnnnnnnnnnnnnnnnnnnnnnnnnnnnnnnnnnnnnnnnnnnnnnnnnnnnnnnnnnnnnnnnnnnnnnnnnnnnnnnnnnnnnnnnnnnnnnnnnnnnnnnnnnnnnnnnnnnnnnnnnnnnnnnnnnnnnnnnnnnnnnnnnnnnnnnnnnnnnnnnnnnnnnnnnnnnnnnnnnnnnnnnnnnnnnnnnnnnnnnnnnnnnnnnnnnnnnnnnnnnnnnnnnnnnnnnnnnnnnnnnnnnnnnnnnnnnnnnnnnnnnnnnnnnnnnnnnnnnnnnnnnnnnnnnnnnnnnnnnnnnnnnnnnnnnnnnnnnnnnnnnnnnnnnnnnnnnnnnnnnnnnnnnnnnnnnnnnnnnnnnnnnnnnnnnnnnnnnnnnnnnnnnnnnnnnnnnnnnnnnnnnnnnnnnnnnnnnnnnnnnnnnnnnnnnnnnnnnnnnnnnnnnnnnnnnnnnnnnnnnnnnnnnnnnnnnnnnnnnnnnnnnnnnnnnnnnnnnnnnnnnnnnnnnnnnnnnnnnnnnnnnnnnnnnnnnnnnnnnnnnnnnnnnnnnnnnnnnnnnnnnnnnnnnnnnnnnnnnnnnnnnnnnnnnnnnnnnnnnnnnnnnnnnnnnnnnnnnnnnnnnnnnnnnnnnnnnnnnnnnnnnnnnnnnnnnnnnnnnnnnnnnnnnnnnnnnnnnnnnnnnnnnnnnnnnnnnnnnnnnnnnnnnnnnnnnnnnnnnnnnnnnnnnnnnnnnnnnnnnnnnnnnnnnnnnnnnnnnnnnnnnnnnnnnnnnnnnnnnnnnnnnnnnnnnnnnnnnnnnnnnnnnnnnnnnnnnnnnnnnnnnnnnnnnnnnnnnnnnnnnnnnnnnnnnnnnnnnnnnnnnnnnnnnnnnnnnnnnnnnnnnnnnnnnnnnnnnnnnnnnnnnnnnnnnnnnnnnnnnnnnnnnnnnnnnnnnnnnnnnnnnnnnnnnnnnnnnnnnnnnnnnnnnnnnnnnnnnnnnnnnnnnnnnnnnnnnnnnnnnnnnnnnnnnnnnnnnnnnnnnnnnnnnnnnnnnnnnnnnnnnnnnnnnnnnnnnnnnnnnnnnnnnnnnnnnnnnnnnnnnnnnnnnnnnnnnnnnnnnnnnnnnnnnnnnnnnnnnnnnnnnnnnnnnnnnnnnnnnnnnnnnnnnnnnnnnnnnnnnnnnnnnnnnnnnnnnnnnnnnnnnnnnnnnnnnnnnnnnnnnnnnnnnnnnnnnnnnnnnnnnnnnnnnnnnnnnnnnnnnnnnnnnnnnnnnnnnnnnnnnnnnnnnnnnnnnnnnnnnnnnnnnnnnnnnnnnnnnnnnnnnnnnnnnnnnnnnnnnnnnnnnnnnnnnnnnnnnnnnnnnnnnnnnnnnnnnnnnnnnnnnnnnnnnnnnnnnnnnnnnnnnnnnnnnnnnnnnnnnnnnnnnnnnnnnnnnnnnnnnnnnnnnnnnnnnnnnnnnnnnnnnnnnnnnnnnnnnnnnnnnnnnnnnnnnnnnnnnnnnnnnnnnnnnnnnnnnnnnnnnnnnnnagttcttcaccgggcctgactgtcggaattggcgcctggatcatgcgtcgtgactccttcttgggcgcaattttgatcaaagcccgatctaccttggatctaggtgtaatactggctgccagagccctcaggatctcatcttcgcccttcgtgcacttcgcgatctcgagggtccacggcgagagcagagccgccccctgtcccaatcgcctttgtagacccgtggatctgaacaaccaggccaacgtcgaatgtctagccaagactcggatcgggcgtccaaccagcatgttgaaacccagatccaggatccgcaacagagccaacacctccttctcaaccacgccgtagttaagctcgtttgacttcagggtgcggctggtgaacgttactggatagtggatcccgtcatgctcctgcatcagggcagccgagatggcccactcactagcgtacacgaccactaccggcaacagatctgcgtcgacgtatcggaggatcggagtcgtcgccatcttgtctttcagtttggcaaatgcccgatgagcgcgaatccaacgcggatctacattgcttggatcgttcgcctccagatccgaagtcttctgtttcacagccttggtggatccagagtccggatccggtaagtctagatccaccgtgtcagacgaggtctgctccgttggatctggagttgtggaagccatcaccgcttggatccggcctcgattctccgggttgctcatcgcggcgtagtccacttcacgtagctcatagagaatcgcagcgtaaatcgcgtagtcctccaggaaccgactgtagtaattcaaactacccaagaacgactgcagggatctaagcgtgcctgggaagggtagatccatcaataccgacagatccttgggattcgcctccagtcccgcgtttgacacgcgataaccaaggtattccaccttacttttgccccagaaactcttcaccacgctaatcgagaggttccgtttatcgcatgcgtcgagtagtgcgtccacacgctcacacagatgatcccaggatccgccggttaccaagatgtcgtcaatatacgaccgacatcccagtacggatggtttgcccggaccttccggttctcccgacttcagatccagatccaacgcctccgatccagatccacgctggaatccaagtttgcgctctgatcccgatccatcttccagccgcgggatccgagtgaatccatacaatacgttgtctagcatccgatgatagatctggggtgcattcttcaatccaaagggcatccggttccactcgaacagcccgaacggggtgatgaaggcggagattgcacgagcccgatccgtcatcggcaccacccagaatccactggccatatccaaagagcagtaccaaagtaccttgtccagatcctcaagcaggtcgttgatcaggggcatcgggtagaccatcagccgggtcaaactattaaccagccggtaaccaatacacaaacgtatgtccatcccgttcttcttgatgatcaccacaattggagatgcccacggtgaagtcgaattcttgatgatcttggctccgagcagccccttgattagatccgacagcttctcatggtactgcggggctaccttgcgcacacgttgggcaataggctttgcatcactaacatcaatgtcacacacaactccttgtgccgcgggcggcagtgcgttgcctttaccaatcagcaggtgccggcgcctccagatccgccgccggagtcgatcgatttcttccgccgtattaacctctggatcccccacctggatgtcttcaatagtcacctcgtccgtggtcgcagtgacttccggtagcaccgccatctccgcttcgacatcttccgcgtgcagatccccactcacgtggtagcagacttgctcatctgcatcagcgtcaccgcgacttggatctatggtagttgttgcatctgcatcgacagttggatctggcgtcggacctgattcctgcgccgtctctccatctggatctgcgcctcgtcccatctcaccgtccgaaacttgaagctcctctggatccatggcctgtcccatatcaccatctgttgaatttgcagatccgccccctgtttctccgtgattaccacccgatgtgacaacaggatggaccgaccgtcccacagcatctggactcaacgccccttcgtgaccttgcgtgtcatcagttggatcttggcccgttgatccatcggcgggtctcagcgcgtcgtcgacacttcgatcggcaattggatctggatccggctggcgctcagcagggacttcgcctggatccggcttgggccaaatgaccgacactggatcttgggcttcctccatccgggcaatagctgtgtgcggctgctcctgtcgaatcgacccattgtcctgcgtcaccgtgggatctggcctcaacggaggtccgatcgtcggctcgtcccgtccacatccaagatccgtggatctgacctggggtgatgggctctggggtggtgggctctggatctgctgcacctctttccacgtgtcaatctccatgcactgacgtaacgcgaacggttgactgcgaggttcgccgactcccagggactcctcgtcacttggatcttgatccggcgaatcttcggcctgcggatcccctccgggtacttgtccgctcgtctcctccagtcgctgatctcgtgtccgcgccttgattgaagcttggagctgcaacacctccgccgccccggcgatgtattcgtcgatcgcctgaccgggcggatccggcagcgacttgccccgtccacccccggcgctcttgggtcttggttccacctgtctgacttgagctggatcctgcctccgcagtattgcacgcggcgtcgggtactcaggacgctccaccatcggccccgtcgggatttctggaggcgtcacctccgcggatccagcctccgtcgtagcttgcagcgcgagattctgccactcctggtagcggcgggatccgacggatacgtaaccttggatccgcggcacccgatcgccggccagccacatccctacttgatgattctggcgcagcaccagctccttctcgccgacgttcgtgattcgaaggtaccgtgtcttgcccgggcccttgatcactgttggcacccatcgctcccctcgtgtaacccaaagcttgtcatgttccgatcctcgcagacgcatgggcaattctgcggactctccgatcccaagctgtagatagcgatccaactttaccgactgcgctttgtcactgtagagtgaacggcgtccgctgagctggatccggacttcgtcaagcaggcagagagtcccatcagctagatccagtcggatcccggctgggaccatgtagtccataccgagaatcgcttcttggccagacagatctcctacccaaatttcgaagaaatacaccaggtatccacccaaggcgatcttgatccgcgttctcccttccgtcgtatacacgttgtctccgatcccaacgcattcttggctctgactcctgtcgatgtagcacccaaccttacgagcaaaggcggtgtccacgatggacacctcggcaccggtatctaggagtaagatcgctttctcattgttgatcttgccgtggatcttggcttgacggaaccatttccctggcgaatgttgtttccagtatcctcgggattctccgggtaggagatacgaggactctggatccgtagtccgccggttcgcagtaacacgcctggatctggatccagccgtatcttcaccttcggcaggctaannnnnnnnnnnnnnnnnnnnnnnnnnnnnnnnnnnnnnnnnnnnnnnnnnnnnnnnnnnnnnnnnnnnnnnnnnnnnnnnnnnnnnnnnnnnnnnnnnnnnnnnnnnnnnnnnnnnnnnnnnnnnnnnnnnnnnnnnnnnnnnnnnnnnnnnnnggcagcatccccgcatgcttggctggattgaaccactggcggatctggttgtaaaactcttccatcgggcaccggcccacgtcatggagttcaccacacccacggcacacgaagaggcaatgatcacctggatgacccttcttgccgcacttctcacacgtcaaccgcttccagcagccgagatgcgagtgcttcttggatccgcagtgcgtacagcggcttcgctcggatccgtcagcgtggatcttggatctctgatcgcgggaggttggatcttgctactgccggtctagagggttccgttccagggctttcggctcttcctcgactggtttcgcatggtcgtgggaggcagacaaatatctttgttttctcggtccttggcgtggcggtcacagcagtagcattttcacgtgttgttcgtcgcttggatttggtcttttgggccactggagccagcgattcagccacacgtgttgctcgccgctctaacttggccgtttggtccgcgggagcaagcgatgcagccacgccgttctccgtcgctgcagcagcagccacacttgttgacgtggtcgtttgaatcgcgagggcggccgattgtcccgcacttgttgggcgttgcttggtcttggccttctgggtgggcgcagtcgccacgaccaacgtaacagcggacgcctcgcgttcttcaccattcgcctccgatgtaggcacttgcgatatacgtcgtttagacaaactggtcttcctctttggagacttgtcgagctgagctggcacaatggccgtgatgtcagcagcagcaccttgctccgacaccaaagcagcgagcatcaagcgttgattcgccgcagtggtcttcgtcatcgtctgatcagcagaggcagatgacgcaacgatgagtgcctggctggctgcgctacatcgatgcacgtttgcccttgtgtgacattgcctagggcgcttgttctggggggggggggtcgggggaggcatcgacggaagtcggaggcgctttctaaatgagtggcagcgaaactaaatcattgttatgatgtggtccacacaatacacttgagtcgtgtaaactgttcacggcgggcatagcgaagacagcgtcagcggtctcgggcgatgattatgccatgaaaactggggatatgacgtcggagcggtgtggttccctatagagctgtatgataaaacaatgatccatatgaaaaaaatgaattgtactccgtttagcgatgggatcgcctcgcgatctttagtgttcaagctggctactgccaagctcaccgttgcaagctccaacttcgactcaaagcccaccagcgtcgagctagcggtggcaccttgcagaagcaaaattgactccagcccccaggcacttcctcgaccgtaatacatgcagtcacgcccttcttcacgcacagaaaacttcgtgcctccgctcccgcctacaacactgccctctctcactctctgcgctatcaacttgttcttcttcggcgtatcatcgatcgtgagttgctcccactccccgaaggcgaccgacgacgaaaatatcagccgtaccagcagtagctgcatatcgcaactccatagcgtagtagtagatacatcaccgatcaccgccgcacaaactggaccgcaccgccagctatgatgcccttggtaacgcacccggacctttgtgcctccgcttccgacgccaacaccagcaccgtcacaccctgagcgctcaaccagttcactactgcgggccgtctcgggtggacgtttttcacttgctcagggcgaccgatgacgccaatacgagccgtaccatcagcgactgcatctcacagctccatatcgtagtagtaggtaaatcaccggacgctgaggcccgccctgacgcgaccgcaacgcccgctctgctggccttcgtgacgcatagggatcttcaagcccccacatctatccacagtactgatcacggtcacactcggtgcgcgcaatttgttcttcttcaacgtatcgtttttcacgattcgccgacggcggccgggaacacatgtgccaccgacggccgctccttcaaccgtcgctcgcccagctatcaacggcagctcacgccaccgtcggtcgctcctcgagccctcgcttgcccaacggcagcttacaccaccggaggcggacaccccgggccttcttctagacgataaatcttgtgcagcgcaattgcgttgcaagcagtgcgccagtaaccgctgcttgctgtaggaaatggaacattgtaccattgctgatatcaagaaataaatatagtatacagaattcaatacaagctcggggacgtagttatggcgcgcggtaatcggcggatcgccacgcattgattgccgcacgctaaatgcgtcaccccatcagcaagatccgtcccggtcgacactaagctgtgtccggtgttccgaagctccctgtgcgtcaagaaggtcaagccagcatgcattgcggtcgaggtagctgcgttgatgtatgacgatgcatgtgctacgatgttatggagctgctagacggggtgtttgggctcgtgttggcgacgttggctgcccttggccagtcagagcagttcaccgccgaggatacgccagtggagaacaggttgaggttggatggtgaggccgtagcctgtattgtgggcagacgtggaggcaccaagctttgtgtgcgccacgaagggcaggacagcatgcgggtcagtgtgttgatgtccggtgatgtatctactactacgatatggagcagctagatgccgcagctgcttgttttgctcgtgttggcgtaggcgatcgccctcggtgcgtgagagcagttcgccgacgatggcacgctggtgatgaggtcgctgttcgtggctgtagctggtattgtgggtgaatgcggatgctcacagctccgtgtgcgtcacgacggccaggaaacgatgaattgcggtcgtgttgttgctagtctcccgtatcttcgcgggagagacctgcacctgcgataactcggagctgttcccggcgggcatggcgaagatggtcacgggtgatgactatgccatgccaactgcgtcggggcgatgtggtgccctatagaatatgatacctttgtggagaagcgcaattcccggaaaagagttatggcagtggatgagacaggtgacggatctggactcagatggatctggatccagactcagatggatctggatctgtacccatgtgatccagatccaagatgggttcaattcgacatcccagcgtaatcgtggagtggtggacacgactcgacgggcaagcagctgacacgcaatgaaggtaaagagggtccatagagtcggtaagtacggatggggtgataggatccacatggcgataggattttgggataggaacgaacttaagcataaatcagacccgaatttgcctggaagagctcaagtggtccggacggctcgacggggaagcacatattggccccgcacgactcgcgctgtggagattggatttggccccacacgacgtccaaggagttatctgtttggccggtgcgtccttctcgtctcaactgtcaacgacaccgtcaatggaggcggcaaacacgattaaggaagacctgcgaaggcaacgtaaaggacaacaacctcgaaaggcaacaacccggccggatccagatccaggccgccagatccaagtacaagaccactggatttggaatactactgcgagcagagtgaagttttccacgctgctccacccacatccccgcgtctcgcccagactgttctctcttcaaggctcggacgcttcggaagacaccaatgcagatccagccctaccgacgggtacacaaggtgacacagatcacggatcatcgggggaccccctccgtaagtcggtgttcgggcgcagttgggaagttggattggcaatctcgcagattaagctaccaagcgtccacaagcggtatctccccccccccccaaagaccagaatttgccttgtacaacgcaagtgcttcctccatcgcctggaaacgggaacgacattggccctacacagcgtagagaggttagcggtagcagatctagtgttggttgtaagactggagtaatatattggccagatccaagaccttcctagtgaactacctgcaattgcagatccaagatccacgctacaccacaatggtgcgcgtgcccggatcttctggtgactcgggatttcaccgtgagtcccaacaagaagttcgagtgaagaaggaacaaggggatcaagcgtcttcgggatcgggatcgacgacgacgctgctgaatgaaacaagatccacggatcggcagagtacaaggaggacctctgtcggcggaaccgagatggatccagacatggatccagaagagaaacctcaacctcctccacaggtcccttcggggaccccggtggatcgcgacaaaagtcaagatccactaacaaaacaaaccaaggctggccaggatcggtatgcatttgctgactctccagtgaaacaagagccctacatcttccatccagacaagacccagacgaagaaaaccgctacgagaaggaaaatgaaggccccggagctggaggacgaagatccagaaacctcggcccaggatggatccgaggcatcatggatccgtcatcacgagaagaaactacgcagctttctgacagtggatccaattatgcagaagttcggtgtgaagcagatcggagccctgcagggacccctgacacttccggcagccgttaatcgtccaggaattttgcccgagatggaacgcctgatgcagccgctgagggatgttggtctcgtggctggagcgttcgacgcgtcagtgatgtacgagatcgatccaatccaactccgtgccacgacggagatgatgttcaaccggctgaaggtgctggtaggcgagatccagccgaagccggatcccacaatcccggatccaagatcactacaagaaggatccacaggatgtcggacgtcgtcaacttatgtgtcggctgcagagcttgggtcggacacgtcttcggagtcgcgacgcatgtcacttgaaccatcgggagcctcgatgctacgcgcccgagcccagatccaacgcgaagcaagtcctcagccccgatcccagcctcgatccaagaagcagtcagctccatcggtggatccaacagcgacggcatcaggatccgacatgtcgactagtagactggagtcgttcttccaagcagctatgaacaggttcttgaaggagcagggagctttgaccccagccatgacaccgggggcggttcagaatcacggatcccaagatgtcgagatggagttcactggatcgtcggatccggatccacactgggagttcgaccctgacgacattgacttcccggccccagcacgcgctacagtagccaccaccgcgaccggatccacaggttcagccctgatccaacgagtccggatctcagcggtctcggatctgaaggagttctctggcaaggaccaagacgaggatcgagcgagagcttgggttagcaaggtgaagtctgcgttcctccgcgatcaagcacctgacgaagagaagtgcctgaccttcgcggatctgctgtctggatcggcgcggaactggtaccgccagctacctcgatccacacgcaataagtggccggatctccttcgcagcttccagacgcaatactgttgattggggatctccgtcgcccgccagtactatcatgctcgcaagcgatcggacgagtctccgctggattatctctaccgacttaacgtcgccggactccgtgctcgactcaagatcaaagacggtggatccaaggaaaagcgggagcatgtggaccatttcattgtgactctgggcgatcaggatctggcggatcggctgacattgctccgactgccggatgctgacgagttggaagaagtcctgcgtgccttggatcgggcgaagaaccgacagaagaagtccgcgtatggatccagcaagtaccgacaaaaagcaccagcgacgcctgcgccggccgctccagccaaacatgtgcgtgcgatccaaatccaacctgactcgggatccgagtcacagccaatgagcgcaaggccatccgtctttcgaggtcgcaacagcgccagcggccgtgggaggtaagcgcaaggagagggacgaagacgacgacgcgcagaagaagaagaacttcgcggccgccgtcctgaaggctaagaagatgagcgcagcgcatggtgggcctatcgctgcactcggaactgctgaagaggatgccccctacgagcaaccgctgcgagcgcctcttttctcaagccaagttggtgatcacgccacagcgggcgtcgttgttgcctgagaactttgaaatcttgatgttttacgtgcgaataggcgctgctgggacgtcaagttgctgaagtgctcctcggaaacatgcgtggttgtaactccatacgccgactgcccgtggttagccaaggttctgacctgccaagagctgaatcgcgtgacgatcatggagactggtagtcacgagacaatggctcgggaccctcgcaaaccccaactcccccccccggctgaaggactacgggcgcgaaatggcgacccaaggactgaagccggcccgaatccgcatgggcatggctgggcgatttgggctcactgagacggagatgcctaccctgcgtcaagtccagtggttcgtcagcagcttcaccaagaaaaatctccacggaaacgacgactatgaggacactcgggaccagatcgaccaactggcatttggaccagcgacaaccgatacccagccgttctcgtttggttgggaccgggacggcaagggcaagtcatatgtggggaacggatccgacgagcacccgtttttggtgggtctcacaacgaagatcttgttgcgcaacgcggctcgagaccccaactcgttcgtgttccacatggacggcaccttcaagttgaaccaagtggcgtaccctgtcataatttgtggtgtatcggatcgcggtcgctcgttccatctggtggcagtgtttattgtctcccagcggctggaggggatctacgttcaagcgctaaccgccccccccccccccccccccgaaagatgtttaccgcggtgacggaacaacagctgctgctcaagtatgtcatggccgacgcggaggctgtgcagctaaacgcggtcagccaaggttttggtgtcgactccgacctcacctacctgatgtgcttttaccacgtcatggtcaaggtccacgaacgcattaaagccgtaccggaccgtttgtgcgaacaagtggtggtcgatatatacgacttgcacttcgctcccgaccaccaagtgtatgacgaacaagccaaaacggtgctcgcgaggtggtcggccgaccaagatctgaaggtgtttggcacctacttcaacaacgtctgggtgaagagtgagttcaaccactggtagtgtttccacactccaggtggttatgccacgacgaacaatcccgtggaacaatttaaccgcctgattaagcgtgactacacgctgcgtaccaagcacaagattagaacgttgatccgactgctcgcggactgatgtggacaccagtcggtgacccctcgcgccttcaaagaagtccctcaagctacacagcagctgaaggcccgcgttaaagagttccggcagcgcgaccttcttcgcgacatggcgctcaagcatcgagctcctactcgcatccccgacacccaatgctgttcgtgtactgtcgcgagggtgtcatcgggtgtatctaccccgaattgggtcgaagccgcgaggtggccccaaatgggagccaactatacgcgaatggaacaagaaggacaacccgatggtggctggcatgtggacgttgagcgactaacctgcggatgcaagtacaacttcaagttcgccatctgcatccatgccttcgccctgcaggtcaagtattacacggggctggacggaaagcggatactggtcaaccgttctgtgcctaggaagcgacgcaagtcgcgtgccagcggttcccgcgttcctgctggacgaccccgtaccaacgggcatgcactgagcactgactaatgttagctgttatgtggcttaactaaaataaagtcatgttgcacttcccatccgttatagcgaaactattgcaaaacctgtaacctacgcgtatgcctcctccacttcttacgtgctactcattttccaattgtctccttcctcctccccaagtacaaccaagatgcaggccgccgactccgcccaagagccccccaacgcgttcaaggcttttttcaattggtgcacggcttaccttaaggcacggggtggggcaggctggacgaggcagccgcccggtacttgaggtcgtggggcgtaatccgaaacgacgcctcgagtaccggagacgcaatcaagcgcctgttggacgcggtgcccaagtaccgcatcactaaagccctacccgtcgaagctgcacagcagggtgacgacacaggggaggcggagtgagtcctacccactggcgtcgacctgcaaaggcgaccgacataccagatgcagactattctcgacgaccggcgcaacaatggaagagttgaattcctaacgagttgggagcctacatgggagtctgccggcaaactaccctccgcagagataaagaagtactgacagcgcaagcgccgtaaggttgagcgtgctttcatcgaagcagaggcagaggaagactaaatcatggaacacacgtaggaaataatcactatcttagtttctactcaacacttaatacattttacttcctacgctaattgcacggaacgaagtcttgcaggcgctggccgtgtgcaagtagtactacacatacatgccaccagcctgcagtcatcagctagaacggtacaggggggttgcccttcaacacgttctacacaagctgtagactgatgccacgtacgttgagtaaagcttcttcagccaggagccgccgactgcgcggctgaggcacgccgcgccggagtgcccgccttgggagccgccgtgtcggcttgggcatgcctccgtgccggccagagtgcgcggccgaggcacgccgcgccgtttgtgcagtgcttcgccgattggaaagtggggcaatttggagccttggtggggacgcgtggccgggccgcgggatgggtggccctcgtccttgcttccccctgcctcgaccacgtcctcgttcttatctgtctggcacccgcacattttgggtaccacctgtttgtcgcattgtgtatgtcctattttgtcatccactggcagaaatgatagagcatggaagattcgccccgtcctcgacacgttggagcaaaccttcaagaatgggtacatacctaggtcaagtttgtcgttcgatgagggaatgcttccacctcactcgaagttcaacaggacacggatgtatatgatggatacgcctcacaactggggagaaactattcatgacatggtgtctagaacgtcatattgcatgaggtaggatttgcgtcatgctggagaaaatcgcattttcagctaacagtatgggtaaatctttctactaatcataggttggaagtctactttgacaaacaggcacatcttggaggtaaacaaactattgacgacaagtcagaacctgctgccgttctacggaatcttgacaaggtacttccaaccgaacaacaagaccacagaattgttgtaatagacaggttctacacgtctgccgcgctgggacttgagcttttgtcaaacaacacttacgcagtgggcacaattcagactcgatgtatcgggtttccagcagaactgaaagaaaagcgtaagaaaaggcctgacgatattgttcggggctcgtacgcgcttgcccgatgaaaggctgttcccgcgatgatagcatgttgctggtgggactcgaagccggtccacttcctcgcaacaggtgccagagtgcagcaactaactacaggttcgtgttgtgacaatattctctatcaaccggataaactaatattgttttcaacgatagttcgaaatatctgggtggacattccgtgcccgaaattggtgatgacaatatgaatgatgtcgatgtccacgatcaactgcgtcaacagcggttttcggtccaagaggcatttaagttcaagaagtgctacaaaaagtaagtgcttggatgcatttattacagtggtgggtccatcttgtatcgtatgtgtatttgtagtctgttcctcgggcttctcgatctagcgcttgtgaacagggctcggaaaataccatactatattgtatttcctgggccaagatcacaataataaataacgcaatagcagcaagaacaatagataatcattgcaaaatactcaatgtattgcaagaccttacatcgctctccgcaaatgcggaatcacttacgaggagcctggtatcgcatcttgtggggcctgtttagggcgcatacgacgcagggtaccagttgactcttcatgatgatgaagaccttcatgtcctctacgagcagctgggagtcttcgcgtgccatgtcgctgcagatggttgtccactggtacttggggggcattgtgagtcgggctgcgagctgcgggctgcgggggctggtgtggcgggttgtggggaatactgtgttttcgagtatgcaggaagatacacagaggcaaccagaagatatgaggtagatacagcacatatactggttgaaattcgactgttctcgtagatactattcgctgatattcagtggtgtgtagtagcccgagtttggtgtgttggttctacgcgcggtgtgccgcgcgtttttagtgtggtgcagcatgtacttgatgtgcaccacgcaagatttatgtgttttcacatatgttgtgtgccaagccatttttctgtgtgttttccgggttctgtcccagtgaatcggtgttatccgagaagtgcaggtgttgcattatctcgtcgaacctacatcgcacactacttagtagcagttggcaacgaaaccgaaggtttgactgtatacctgttccatggcatccatgcgccaaacgttccttaacccttctagccccagatcttattctgtatcctacagaataagcattagacttgattaaagtatccttcaaaacctgtcaaagatttgctgttggaagccctttcgcatcttgcggtcaagcgctgggtacattgtgcacagaacagctacgaaagtgaacaaaacatgctcaatgtatccaccatatgccgaaatggcgagcttctattggtcgtggcgagcgtagagcacgctcaaaacctcgtaggaaccgatgaggttgtgcgctgactccgcaatcgatttgccaatcgggccacacgggagagctcatagcgtcgtctgggtcggatcaccaggtctggtaatcaacatcgcaacgtagaatcaatataccactagtacaatgttacagagcacagtacacgctctcgcttacctgtagatcacaatggcgctcatcatgatcgtcttcggccatggtccttggccacttgggcgcgctcgacgggccccaacaaagcttgcattgcgacgtgttgaacagcgcagtttcggaatgaaggaaagtacgagtggctgacacgcggcggttttaggcttccacccgaattttcaaacctgttggtggtcgtctattaccgcggaataaaccccgtttatcttcccatcgctaatctaacaggaagatgtgcacaataccggctatacaaacatccatatgcgaagttcgaaagagaggacaagtttgctggatattatgtcctgtgacaatgcgtattctgtaggatacagaatacgggttagaggggttaagggactaccccagctcttgttgtgctccaatggctagataagcgtcgtttatggggacagagcatacatgcgatcaagagcccaaacacaagcgcatactcatgtggtgcgaacgactccatacggcttagtcgctctcgtatctgggccaatgactcaacgtccgatgaccttgatcctcggtttttgcatcgtaattggcgatctcgtattcttcgagctcgcgcgatgagtgtccgggctgcgtaccgattgctctcctctgcaattttacgcacaatttgctatggaaaaaagaaccaaaacaaatcgaacggagggtcagcgatcttgagagcctcatcggacggaccccacgcgccgttatacagtccatggtactcaggtcttctatcggtcgttcccggaactacacaaatggtaagtcattagtatcaatatcatgccgtacaattatactagcattccagccagcgtattattttgtactttttccctacaagaagtctcccatgccttgatctcatctcgattttttgccagcttcagcagcgcgtcgtcgtcataaatagtgctgtcgtccatacagtcgaaaacctcaaattgggattgcatatctaaaacggacaacgcaggccagtccttggaatctccactgtcatagtcttcatagggaccgtcggactcaagtctggtatataacctgacatcctcatcgcggagcacattgacatcagcagccgtagctattatattctctctgcgcttggcgcgttgcatatcgttcattgacagtccattttatcaccatcacttccttctacttcctcggagtcgctttcgttagattcatcagtctccgagccgataagcgcctcagcacgttcaagcagctctaggtttgacatcgacagagggtgggtggacccgactgtgcgttcctcagctggtttgggcgcgcgccctgtgcgtcgcttggtgttttgagtgatcggcacataggcgtcagctacaccaccctgtgtcgcctttgttttgcgctttggccttccccactaataacctggatattacaggcaaataacatgttcgttagtagtgtccaaaggcacatgattaatactgaaaataataacataccttcacagcagccgtctcgaagctgggagagtgcacgatgcttgccgtggggccgagctttgacttaagcagcgggaagcgctcaacaatagagtcggacagcacacgcacatctgcaagtgacaggtcgtcggactggagtgcaacggtgacctgtcaaaaatccgtaggtcctcgagaaggctcttgatacgtatgtgcattgccgccttggggatgagatcgaagacaacctctacttgcttgatatcgtcccggatacgaacgtagcgcgccaacatcttgaaggttgagccccaacgggtcacgttcaggcgcagcggcgacagcttcgtctggtccttcaacgcagcgcgattgttgatggtgcgcaacgcttgcatcagcgcgctcaccgcgcgcacatcgtccgtgcagtcctccaggtacttgttcaccgccaatttaaagcggtgagatgcacagccaatcagcgggacctcgaggcgtgtcgcagttgctcggttggtggctggcgcaattgtcgccaagcaaaaacgccaagctctccagtgattggttgtatttctcgaacacgcgcgtgatgaatgcgcaatgcgctgggaccgtcagatcgccctctcccatttgtgcaatagcaaggagcggttgctcaagtttcccgttcttgcagaacacgccaaatacagcaacatagtgctctaagttgcacgtccaaccgtcgtacatggcgccgcacaccccttgcatgtcgacaccgatcacgccctcgacaagcgccttcgtagaagccaggtagagcttcagggtcttggagcaggtgggatctagggcagacatcgcccaggtgattgggtcgtcgacctcactgaggggcatgttgcggtcgacgacccacgccatccagcggtacatgttggctgccctcgggttgacaaagccaaaggcggagagagatccagcctggctgagctgatgggctgcgtagtcctcgacgtagttggggtacttgtccttgagatggctgagcaagttggcgtagccacttgagggaagctgctggcggcgcgtgccgcagtagttgcaggcgtagtagtggtcagttgtcgccgcgtagaagaagcgacagaggtcgcggttcgtggtcgaagtcatagcgtggagaacggtgggggctccagcagggcgaataggaaatgagagagtgagtgcgcgaagcacaggttggttgtacggtggagaaagcttgacgttgcctctccagagccactcaagttgtcgttttgaccggtccgcttggaccgaaccgacaaatattatattaccgatatattggtgtcgatatcaataatatgtattcttcatatattacaatagttaataattccgtacaaaaaatagcagtactattgatatggaataatatttttcctagcgacgcctacattgctcatcgcgaataccacaagaggcgaggaatacgtggtttgtcacattcggaatttcatactactccacatgctgatctgctgacgactcaaccgaacgatatgctggatggcttggtataaatctgatgtgtgtgtgtgtgggtggggggaggtgggtatgatctggcatttttctccctttccccttgagcaaaaaaccaaaacgacgtctccagcttgtcctctcctccgacatgtgcactaatttgttgacctctgctattaaaatcaagtggacatgtcgaaggtacatgtcggagaatatgcccaatgatagcattaggatttgatcccagcctgactttttcctcctacatacaaacttatatatgtcactacgtcggagtatctgacgagcgaacatggtcacaaacagtgggaatgaggggttaattacgcctacgaccagcagtgatttaaaagtcgggcattgctttatcgagctgaatggttggtacacgcgccgcagctcgcacctggagcgaccactgtggttgatgagtctgtagttcagtaaaaaatgcaatgggcctttttgttatgtatgtggaccagttgagagcggcgaagtttatatctacgctggcagcatccctgattttgaaaatgaggacactgcgcagatcttggagggacgcttcaacttcatctacggagacgcgcacggcgtcacgtatcttttggaccctcgctatcctgagcgtggcatggacaagaacacgctggcgcaagtgaacggctttgtcgtcgcctgagacagtagggctctacggctgtaaagttggtgaagtatcttggcatgagtcgggacacgtcgagggaggcgaagctcatgaagggcaagaagcgggcgattctcgagtattggcgcgtaatgtttcggtcccctcttacgcgagcttgcgcttgtcgtgttctctgcagcctgttccggtgcgaccgcagagcgaaacgtctccgcccaacaacttcgtacactcgcaggcttgtaaccgcgccagggacccgatcgtccagaatttggtcttcacatttttcaaaacgaagaacttcgacgactaaaacacaagccctcctacgacatggttgaagatctggcgagcgcaagattggaggtcaaatcgaatgctaacgaggacagcggctatgagtactactaacccgctggtagcggcgatagtagtacaggtgctttaggcgtactcgactaacagatgaatgtttaggccacggtagattaacatgcaataccaccactgcctacccttgagacggcttttcccgaccccataaagttttcgcagcctcaaagaagtcgaatcgagcccgacattttgatagaacaaggtcgtgtcttgtaggttatcgacatactgttttcgacaggtagttcatgtaagtgctaacacttcagaaattcggttgaagttgttttgaccttggcatcaacttcagaccccccccccccaaaaaaaaaaaactgaaagtaaaataacgaccgcaagcttaaatcgatgattttgaaacgaatttattattttgcaggttatgtaaagtcacattatgtacactgctgtttttcaagaatttaaattttatagttaacaggtgcacaaaaatataaaatatatggctcgagattaacatcgagagtggttactttatgggatgttccgctgctatttgcnnnnnnnnnnnnnnnnnnnnnnnnnnnnnnnnnnnnnnnnnnnnnnnnnnnnnnnnnnnnnnnnnnnnnnnnnnnnnnnnnnnnnnnnnnnnnnnnnnnnatgaacgactagagctgcatcacattcactgttaatatcaaacaatcacattaaacacaattgagaagtacaaacacatctgaatcgactgcttgtttgggtggtctactcacgcgaaaggtggcgaatgaggcgacggtctcgagcagattgatagccccaaatgctggctcggtgccgcacttcgaactcggcccgagtctgccatggcacgttctccgtaagctcccacgtgagatcgttgaacccctcccattgcacgaggtaaagcacgagcgtataaatggaccgctttgcccacaagtgacgcacttcatatctgtcctcgggagcttctttgccagcgccagccggccaccaccccgaattagaacgctgtcgtctacttcaaatcagcgtcgaggtcagacggggcggtagtcacgatggcgcgctacgtagttcgccgtaagaaagcgttagcctgacaaaggatcaaagccagaggcgtgtcgttggtgagtgttgcgtgtcaccatgtttgctgctgagttcttgacgtgaagaggtctaaaagaagaatgaagttgtcttcgctttgaacttctactcaggtgcctgtgtaccgcatcgcaaatagcagcggaacatcccataaagtaaccactctcgatgttaatctcgagccatatattttatatttttgtgcacctgttaactataaaatttaaattcttgaaaaacagcagtgtacataatgtgactttacataacctgcaaaataataaattcgtttcaaaatcatcgatttaagtttgcggtcgttattttactttcagtttgttttttttgggggggggggggggtctgaagttgatgccaaggtcaaaacaacttcaaccgaatttctgaagtgttagcacttacatgaactacctgtcgaaaacagtatgtcgataacctacaagacacgaccttgttctatcaaaatgtcgggctcgattcgacttctttgaggctgcgaaaactttatggggtcgggaaaagtcgtctcaagggtaggcagtggtggtattgcatgttaatctaccgtggcctaaacattcatctgttagtcgagtacgcctaaagcacctgtactactatcgccgctaccagcgggttagtagtagggccgccgccacgctgccacgcctggtggagcggctggccccgagatgccggctaatgataattctactctgcagccgcttagtgtcttatcagctcgagcagcaacgcagggtacccgccaggaccacgatagcgcggtgcgcaaatttgaagcatttttgaggctcgagcaccggttctcgtatgatgatggtagtgatgtggatgtggagaatgtggagaatgctggacacctgaagtatttgagctccatccgggtcgtggtggaaaggtaaacgggtacaacactttttagggagaaccctctatggtaccatcagcttcgtgcatcgcaagagaaagaccttaaaaaaagtgcctcctggaactgcaccagctaatcgagctccgatgataacacctgaggatctccgtatcattcgaaacgcgctatttgccgaaaaaactgttctagcgataaaaaccaggacgctggcgaacgttcagtggtctgtgaaggggagaatatccgatatagtcggcctagattttggtgacattcaatgagtggacgatgctatgctttgccagatcgtgcgaaaaacgttagctaaggagcaagcgttatctttggtatgctcctcatagtcttgccgtccaaattgtttccgacccgtacaacgcatccttccgacttttcctcctagttgaagctagtggagtctcgaatcgtgaagccagccacatcaacggcactcactagcggttgtttgactgcgaaccagctcacccgtgggctaaggtcgcattctgcccgccgcggagcagcaacgcgagtggcatcgaatcgtggcatacatctagctgatgtagccaaccgaagaaactggagtatggaccagatgatgaagttgtttgcatatattacgtctaggaccagcagtgatttaaaagtcgggcattgctttatcgagctgaatggttggtacacgcgccgcagctcgcacctggagcgaccactgtggttgatgagtctgtagttcagtaaaaaatgcaatgggcctttttgttatgtatgtggaccagttgagagcggcgaagtttatatctacgctggcagcatccctgattttgaaaatgaggacactgcgcagatcttggagggacgcttcaacttcatctacggagacgcgcacggcgtcacgtatcttttggaccctcgctatcctgagcgtggcatggacaagaacacgctggcgcaagtgaacggctttgtcgtcgcctgagacagtagggctctacggctgtaaagttggtgaagtatcttggcatgagtcgggacacgtcgagggaggcgaagctcatgaagggcaagaagcgggcgattctcgagtattggcgcgtaatgtttcggtcccctcttacgcgagcttgcgcttgtcgtgttctctgcagcctgttccggtgcgaccgcagagcgaaacgtctccgcccaacaacttcgtacactcgcaggcttgtaaccgcgccagggacccgatcgtccagaatttggtcttcacatttttcaaaacgaagaacttcgacgactaaaacacaagccctcctacgacatggttgaagatctggcgagcgcaagattggaggtcaaatcgaatgctaacgaggacagcggctatgagtactactaacccgctggtagcggcgatagtagtacaggtgctttaggcgtactcgactaacagatgaatgtttaggccacggtagattaacatgcaataccaccactgcctacccttgagacggcttttcccgaccccataaagttttcgcagcctcaaagaagtcgaatcgagcccgacattttgatagaacaaggtcgtgtcttgtaggttatcgacatactgttttcgacaggtagttcatgtaagtgctaacacttcagaaattcggttgaagttgttttgaccttggcatcaacttcagaccccccccccaaaaaaaaaaaaaactgaaagtaaaataacgaccgcaagcttaaatcgatgattttgaaacgaatttattattttgcaggttatgtaaagtcacattatgtacactgctgtttttcaagaatttaaattttatagttaacaggtgcacaaaaatataaaatatatggctcgagattaacatcgagagtggttactttatgggatgttccgctgctatttgcgatgcggtacacaggcacctgagtagaagttcaaagcgaagacaacttcattcttcttttagacctcttcacgtcaagaactcagcagcaaacatggtgacacgcaacacccaccaacgacacgcctctggctttgatcctttgtcaggctaacgctttcttacggcgaactacgtagcgcgccatcgtgactaccgccccgtctgacctcgacgctgatttgaagtagacgacagcgttctaattcggggtggtggccggctggcgctggcaaagaagctcccgaggacagatatgaagtgcgtcacttgtgggcaaagcggtccatttatacgctcgtgctttacctcgtgcaatgggaggggttcaacgatctcacgtgggagcttacggagaacgtgccatggcagactcgggccgagttcgaagtgcggcaccgagccagcatttggggctatcaatctgctcgagaccgtcgcctcattcgccacctttcgcgtgagtagaccacccaaacaagcagtcgattcagatgtgtttgtacttctcaattgtgtttaatgtgattgtttgatattaacagtgaatgtgatgcagctctagtcgttcattttgggaaccaaccacttggtcaagttggtgagcagatacatgacaaagtatacaacaagttcaacgggatcgacctaccagcggtcagagatgccacgcagcttctggatggaattaggagcgatgaacttgacgagaccaagatcctccctctgctcgatatcggcgatttcgccattgcagaggtctcaatccagcacatcctcgactacgtttactataaggacggtgggttgctacaaaaaaactacaggctttccaagatggagttatttattgtgttgacttggaaggcactgtctaagtttactactatatcgctagaagggtcgcaggataacgtatgtagccccgcagtacatttgcgttgttcgcactgcaagcacgacacaccagccaatggcagctaaacatcccgtcatcttccactggatcttgaatattacttgttaatccttgctaaatgtccgttaaaaaagcgcaaagcagttgcatcatagagtggacatactttcgttatctgagctagacaatatccaacctaacgctagaaatctcttagcactggagctggaagagagtgccatgacagcggtatagtccagcgtggggctaaacagcaaaacaaaaagcgcaaagccgcaaacgtagctgggatagtagcggggggggggggggctagcatgtatagcatgtagacgcagtagcgcgggcagcggcgccgccgtaacgcagcgtcctgaccacggtaaatcaccactgatcaatgcccactagcaggatccaggcaaaaattgactccgtaacaccgcccgttgctctcaacaatcatgatacgagatctacagcagcatcacactaaccgtataggggagacacattaaggcatactcaagcaccgctaaaacacctttaataattggccatgacgacgcagcttccaccgtggtaacacttgccttctgtaccgtcgtttggtagaatgaaggcaaagagtaaaatgcccctgcttaagtcacaactttcatttaggttgagtattgaaagatgtgatgccaccctcattgcatcgtgagcctgtcggggcaagtacagggataggaatttcaccccccccccccccccgaaaaaaaaaataaataataataattggggtcgaagtccccacttacattgacttaatccctcaggggtagaggagacatctgtactggggactcaccttaaaccgaactcaaatgttacttggtttaagatacatttgtctttattccaaggggtcctagttctataatcaacaagttggtgttagttgtactactatagttagtaaagtggagatataaaatttggcattagtaccggctaaataccaatcagcttgaaattaccggtgtctcgaaatcaaggtgcggactgcgtactgcggatctgcgagcgctcattcacgtcagcaagatgtggggcatgaacagttatataataagtatggtagtataaccaagaagcgactggtgtgccgcatgtgcggcgcgcccaagtcgcttccggaatcagtttgttagaatgaggtccccaaaggctctgtaaaggtttaagtgtaaagtgtacccgctggcattaaggcgctttcccattggttaagggagagccaatcataggagccaatcagggggcgccctgttggcgactgctcgtgtggtgatggtttgacggtattcggagagagctcacttcgccttttgccaacgactgagcactattctattagagggcattaagagataaataaagcttaagtttgactaaccgcaactgagttttaacatttcaagtactgaatgctcgaaaatggtcaaggccaaccgagctaccttcgcggggcttaagttcaatggggacccgaacgacttccagcgatggaaagacgccgtggtcgcacatctcgcgaacaacaccaacagcctcgaggtctctgagattcaagccgggaggaccgcgccccgtcacgggttccaggatttgctcctgggccctgcccatatcgtggatccatgaccagatgctcccgatgctgctcgcaatcaggtggctctgctgggcgaggtggattcctacataaaggacatcttcaaccagaccctgcctcattcatacatgaatcagctgagtacaccactctccgcgcaaacggttgcggcgttttggcagcaacttgaggttgaccttgggaagtgcgtcgctatgggcatggtggagttgatcatggaattttagaaaaccatgactgatgatttcaaatccgtaggcgagctctttcatttgctgcgcaacgtgagaaaccggctgaaccgccaagggcaagaaactctacgtgtgcactttgctgccaagtcggctgatggttgggatggtgcttgcactactaccgggctatctttggggacctagcatcaccttctcgcaggaggaattcaccctggagaaaattgaaacaaagatgagcttaatcttcggcaataagagtaagatcgagattgaggcgatggacaagacgactcagcgcccggttgagatcccggtcaactacgctgccagaggaatggctagcacaaagaagggaccgatgaagaagtctgacaagcgcaaggcgatgcctctgccgatggacgatgagcgcgtgaacgccttcttctactacaacggcgtgcacaacacatgaacggaccacccatcgtggtggtcgtaaatgtatgtggccattggtgtaccttacgccaaggtcgaggaagtgttcaaacctctaacagacatcgcatctgttagagtaacaactgactgtagccacttgtgcgtgtaaccccgtttcaacatccccccgtcaaggttagacgtaccggtcccggcacgtcaaccaccattgaccgcttggtcaatgcgtgacgttgaagagagcgctctcgttatggaacgagcgcgtcgaagttgaagccctctggcgcagcagcggagaacctctctgctgctgagtagcatgcgcggcaacgtgcgacgcgcgtcgcgcgtcgctgctgcgggggcaggcacctatatctgccctcgaagtgtcttcgggcgctgctgttaacagcagcgctcgtatgacgttccagtatgtagcgcatggtttgcttcgtatgccctcaccaagtctggaacgtcttggagcaagacgttccgtgactcccatgtattttggttgggaggcaatcctctccaacgaattcgataacgaaccggctgccggttcgttttcgggatactatggttcacaatacgttcaacaatccagcgtgttgagccgcgggcgtcgcggatcggaggcggcgatggtgggaacacgcccccggtatggtcaacctggggttgaccttggcccgacgctcgaggagcaggttgctgctgtggaacagcatcagagccgggagttcaccgctctgaagcaggaggtggcgatcctgagagctcaagccgctcagggttcgcagacggcatcggacatctctgtcgacgtgggaggttgcgtcgcacgcttggcccagcgcgtaaacgcgctggagcagagattcgctcccgctggtgtgacgcggtgtcgatccctaaattcgggtgaatgcacctggacctgggaagttccaatgatgtggagcttggtgatactggatgatttggagtctcctataaaaacaagggtaatgtctgcgaatggacgctgaatcccggaagatagatcaatgtggccgagttgatcccgttccatgcagtgcaacggaatgcgagcgatcctccccagtatatctaagtacagcagaactcgactctggcttacaacctgggagctgaggcacttctcagattccccgttgttttcccggaataacgattcccagacttcgcgttcccagacttacctcccacaaaatttcaagaacgacctcggcttgaggcgttccgaggttccaaacccaagaacacttggtttcactatggcatcttccaagatcctaggtgtacccaacaactccgagaaggtatccagtttggcgacccttcaaggccagaccaacactccgcagaaagatcgcagtctccgaagagtcgcttaggaaagattttgtctgcatgtgacctttaaccaaacagagttcgttttgcttcgaagggcacaagtgcttctttcacagcctggaaggccgttctccacgacaaaattcaaagtactttaggtaagtgatccactgcttcggcctggaggtgagcatatctattccatatctgtatatttggcggattgcagaccgtctttgctgtatactgcggtctattgggcctgtgtcgaactgaagaagttggcgacagggtagatcgtttcctctctccgagaggtggtgcgcgtccccaagattgatcaagtgtcttggatttggaccagttgacttgtgttttggccttagccttgggcctagagaaagaagagagggcaaagaagtatttgtgtgattgtataacgtgtataactctatttgggttggattgttctagcgttagctcggcgtagctgtctgattcacggggtcgatactaacctcctggtgaaaagaaccgctacccaagggatacacatcgtgcgcctgaccaacagcgtgtactggacaacacacaccctgtgccagccgagacggatccaaagctcgcgtagcctgacgtctgtcaaggagggcctataactgttttctgggagaaaacaccgcatcgcatcgtcacactggggcttccgcttcgggccagccgagctaggtggctcgtgctgccggtatggcttcagccgctgacgtaaaaggtcggatggaggcgcatgctagatggaatatctagcgtgtaggcgttgccatgccgtgccaacaccgtgatcggcccgatgaagcgcggagcgagctggctcgccccgaagtcggaaactgcatgtttaggcaggttttgagttgctaacaaaaccaatgaaccattcttgaattcattagtgttgctcctaccaacattgtctgcgttcagcttctgtcggtcgacagaagctgcaatagcgtcttggacaaaccgaatgacggcttgtctgcgctgcacgaagttgattgcgtccgagctgaactcgttcagctcgtttctagcagtaggcccggcctctgcgtttgtcttcgtggtgtatgtgccctgcacagacacgttcttcttcttcttcttgctcttgccggcgtctgtgcagggcacagacgcgtgcttcttcttcttgcgcgtagtcgcggctgacactgtgcaagtgtcagcgccattctgcggctgttgcgttgcagtcggagatcctcccccacttaaggaaggagccaccatcccgagtagactcgggaggcgagggtgcctcatggcattcacgtagaacggcgtatgcccagtcgaggcatgcaccgagttgttgatagtgaactccgccatcagcaggcactcgctccagtgatagaacgagtgagtgtagctcttaagcacgtctacgagcacgcggttcacgcgctcggtctgcccgtccgtctgtggatggtccgcagtcgacatcgaaagttgactcccaagaagtgtaaacacgtcttgccaaaggtgtgcagtgaagcgcgggtctcgatccgacacaatgtcgatcggcatgccatggtgtttgaacaccatgtcaacgaacagacgcgccgtctgcttcgcagtcacttcagcggataccgcagcaagatgtaccatcttgctgaagcggtcaacaaagatcacaacgcctgtgttcccctggctgtccgggggaagaccgaacacgaagtccaaagacatggactgccaacactctcgtggcgttggtagtgactgcaagggagcctgcgcgaaaggcgcaggcttcacacgttgacaaacctcgcaagcacagacgtacttgcgcacccatttatactgatgggcccagtagaagtcacgcgtgagaagaaggtatgtcttctcacggcccggatgccccgcagtcggtgcatcgtgatactcgtacatgatcctgaggcgcaggtcatggtcattgggcacgccaacgcggtccgtgttgtcgtcgactgcactgtagagtaataacccgtcgggcacccggtaacggtgtgcacgagcacgaagatgcttcggcagcttctgacgagctttgtcagaaggcgctgagccgtaggccagcaagagcttcgcgtccgcgtcgtgcgcgaacgcgaccttcacgtcgtccaacagtgacgccgtcggggtgctcgatcgcatggcgtcaatggcattgacgtcggcatcagccgtggcgtagtcaggtcgacgcgagagcgcgtcggccaccacattgagtcttccgggtttgtattcaacccggaagttatactctgcgaagaatgagagtcatctcgccatccgttgcgagatgggcggtgacttcacagccgtccgcagcgacgcgtggtccgtatagaccacgaacggtttgcttccaagtagatacacttggaacttcgcgagtgcgtacttcatggcaaggagttccttgtcatgcaccgggtagttgcgctcagctggcttcggctgacgcgattggtaatagaccacacgatcacgaccctcgtgatcgtgctgcatcaacgcacatccgattgcgaagtcggatgcgtcacacacaacgtggaacgggtgatcttggtcagccactaccaagatcggcgcctcagtcaagccctgcttgactgcatcgaaggcctgctgacactcagcagcccaattccactcggcgtccttcttcaggagctgtgacagcgggctaatcgtgcccgcatagtccttcacatacttgcacaagtacgtcgtcaagccaaggaactgccgcagttccttgacgttcgacggcgtcggccactcattgatccctttgaccttctcagggtcagggcggacaccgttcttcccaacgagacacccgagcacgggtatctcgctcgccccgaagatgcacttcttcaggtttgcatagagcttttgcttgcacatgagcgcaagcagcttccggagatgcactttgtgcatatcaacatcgctcatcccgtccgcagcccggctgtggacgaacacatcgtcgaagtagctcggtacgaagtcgcgcaccgagcgcaacaagtgcgtcacgcacctgttgaaggtcgcaggggagttcttcagaccctgtggcatcactagccactcccagagtatgccgctcggcgtgctcactgccgtgagagggatatcgctctcacgcatgaggatctgatagaacccatcgcgcagatcaagagcactgtagatagtgctcctggccatcgaatcgatgataacatcttttcgcggtatcggtgtctgcgccggtatcgtcgcatcgttcagcttgttgtacgcatgaacgatgcgccagccgccctgtggcttcttgacacatatcgtcggagcactgtgcggggatttcgattcccgcacttgtccagctttgcgacgactttcgaagaagtcgtcgatcgctttgacctgctctcgcggcagtggccactgccgcgtgacacagtacttcgtgcccggcacgagatcaatctcgtgctggattcccttgtcctgcggaagctccgcaggaatctcttccggaagtacgtccgcgtactcccgtaagatctcgtagtagggactcgtcttcagcgagccccagctctgctcctcaaagcgctccttcttagtcttcgcactgagtgtcctcgctctcagtggtggtctccatgaagaactgcctcagttcttcattctcgctcttcgttctctcggcgtccgagagaatgcatatttgctcgatgcgtccatcgtgcaagtcacgcgcgaagcgcttccagctcatgactggaagcgaagtcaactccgacgcttgcgtcggagggttagtgagagtcatctccctgtaccggaacccggcacaggtacgcgtcaagacgttcaacgtctcaacgtccggcttctcagcctccgtctgcccggcagacattccttgtagcgtctcggccccaggccgagacttgcgcagcgaccttcgcatgcgccgtcttcttgttttgcggagcccggctccgcttggttcttgacctcgtccaggcccagccgtggacgggtgttcttctttagtaccgcttgctactgctcgcacgcgcccagggcgctccgggacagcgtcgtcaagcgctgtcttgtctggagagtcgcgcgcacctgtcggcgcgtgcgttgcggcaacagggccatcgctctctgttccgctatcgcgaccgaagcgcacaagggtgcgcttctcccagtctagtaccggatcatgccgtgcaagccacggcatgcccaagacaatgtcaaacttatcgtccaggtctaggacgatgaagttttcgacaaacgcttgtagttcgtacatgaagcgcacgcgtaccatgcgcttctcggttttaacgatggcacccgttgccaatcgaacttccaacatacttcgaggtataattacctcctcgaagtcaagccttgatagacttcgcagtcgaacaaagttgttcgacgcgcccgaatcaaccaaagcacgaagcgagttgctctctctctcttcgaagccacgttcaagatgacaaggttcggtttgtcatcatgcattttgcagtgagaatcactgggggctgcagtcctcagtgtcgcatgtccgagttggacacgcgtgactgcctcaccagtagggtgccccgcgcctactgggttccagcgttttttgtttgtccgcggcgatgcccggcatcgccgcgtcgaccaccatctcggtgcacgggtgccgtgcactctcgggcatagtgaccgatccttccgcaacggaagcatcgtacattacttccttgttgctgttgataatcaacagccgttgcattcgagaggttcattggttccggacctcccgctatcgcaaccggaggcgatcgcagcctcggcgcattcgcatacagcttagcctgccgcaggctaaactcctcctgcattgcaagagtaattgcagcttcgagagtactcgggtactcacggaagagataggtcttcacaggcccatttcgaagtcatttcatgatcgtgacaaccttagtcgcctcgtctatcgggttggtcacaatgttcgagaccaaataccgtgctctctgcgcgtaagcatggacatcatgctaaccctgctgtaggtcgaggaactctgccctcgaccggaactcgttttgcgggagctcaaatgcttgtctgagctcctccttgaaaccctcgtacgtgccgaagcacgtaggatcagagagtcggcgtccatacgcccaacttctcgctcgtccgccaagacatgacatggcgaacgcaaccttggacaacgggtcgacgatacgtcgagccgcaatggcagtgtcgagttcgacaagccaccggaggagaggctcgccttctcttccgacatagttgctcacgtttagcttcaacgattgctcgcgcggtgtcgtccccgacgccaccgtgatagaggaagcagcatcacgctgctccttcatgatgaatcccagagcaacaccgtgttgctccgtcggcgatagtgtgcgcagcattgcagctacagccgcttctccaatgactgttgacagtctttggagtgcctcccactctgggtccgacaggtggaggcagtcagcacgtgcaacatgagttgcaggcgaagtggagctttccatgggcacctccgcgctcacgaaaaggttctcggctcctcgttcgtacagctccgtacgaacgttcaggtagtcagtcgttggacggactacaaagtgctaccaggtgtaatgggcctaccttggctcactactacggcttacacgtatgcgcacgtgtatgaggaagcgtaggtttcttttacttgagttaagtatactcgagatccacgagtatactttaaacaagataaactccaagtagcgggttttggtaaaagatgagaactgctatttttgttttatgtttctgacttcctctaaatgtaataatctaaactaggaatctgccaacggctggttggcaggattctgctaacatgcaagtcactcattggctaaaagatgctgctttcagccaattggaatcctaaatgtgtatggaccacccgtcgtggtggtcgtaaatgtatgtagccattggtgtaccttacaccaaggtcgaggaagtgttcaaacctctaacagacatcacatctgttagagtaacaagcgactgcagccacttgtgcgtgtatcccgttacaagtccccatacgaaatggtgcacggtaaaccaccagacataagtgaccttcacatttggggaagtatatgcttcgcgcatgtacctaaagtgcgcagcaaagataagaaactatcggcacgagggataaagtgcagattcttgggaatgtcggacgagtatgtggtaagaagatccgctcaagaacggtattgatggaaccggatccgtcagttgaccaggtaatgggatccagcagttggtgacgatgcagatgacgcaatggttgctagatggagtgcagttgctgaatcagggcagttgaagttggatcaggcacaagtagtgtggtgcacacggatctggtcacctacattaggaactcctagattaggtatggatccgtaccaatttattggtacaatagctgtgttgggataattaggcaggaaggagagccagtagtggataggatccaagccggatgggaaggctgggtacaggctaacataaatcagagtcgaattggcttgggaaccacacccttggtccttagtattgagattagtattggcccatactttaatcaagtgatttgccccccgcactcgtggcagactgctggatagcttggccagcagctcgcgcccttcggccctcgacccccaactcctccgctaataggaggcggcaagcaacgtaaaggaaaaaggatacaacgcccccaaccaggcaacaactccgaatctggtatattacttatcagatccacaagatctacggccaagaccaaggatcaacctacccagatctgcgtgaaggaacccccactgcgggtctaccctaacatctccccaagtccccgccaaggacgttcaagctcaccccctgcgtgtctcgtgtcaatgagagagcagatccagtccgccgacgggtacacaaggtgagcccctcagcaaactgcggttatcggagtaccccctccgttagtcggtgtcggggtgcagtgtgtgagtgtggggtccctgctaattccagcggatccactccaccacaagtacaagagttatcggcttttggatgtgtataataatcggttcatatactcaaggcacgtaatgttcgacacacaacatggatctgagatagtgttgcgtgcatttggaaaggaacaaaatgaggagaataaagactctaccccaccagtgggagagactacaccaggctcagggccaacccgaattctggggaaaccagatacagaacaagtgtctgaccaaaccttgggagcacctaagcaaaagtgagggttggtagaggtagtgggagccaagccggctaagagaccatgccgtgaaacacgaaagcctgctaaatttggggattatgtgtgctaccaaacccacatggacagcgttaagccctgaaaattctcctgattaagataccaataccccgcagccttacggaagcattgcgaggaccacataggaaaggtggaggcgtacacttgatcttgagtatgattccctaatagacaacggtacttggaagctagtaaagctgccacctgggagaaaggcactactgtgtcattgggtacttgtggtgaaataccatgctaatggagtaatagaacgctttaaagcgcgacttgttgctcaaggaaatcatcaagaacttggggttgatgtagacgaggtatacgtcccagtagcgaggtttgagtccctacgccttgtcttagcgattggcaccattttagattgccatatccaccagatggatgttcacacagcattcttgaatggagccatggatggagaccagcgcatatatatgagacaacctccggactatcatgcaccagggaaggagggctatgtgtgtgaacagcagaaaagcatctatgggttgaagcaggctcctagaatttggtatcaggtgctgcataaatttttcacatcaatgggttttgtacgttgcaataaggagttttgcatctacatacaaaaactgggagatgaatgggtcatcatcgtggtatatatcgatgacctggcgatcatgtcgaaaagtatgcgactgatcaacaaagtcaaggtggaactatctatgagatttaagatgaaagacttgggagatgtccactacatcctaaaaattgaagtccgcagaaatagagaagaatggacaatgtccatctcacaacatcagtatatattggaactactgaagaagaacaacattgagaacagctcagctgtagcgccaccccagattacaggtcttgagttaggacctgaaactaagatgactgcagatgagatagcagctcagaaatttgattacagaggtttggttgggtcgctgcaatacctagtgagaagtactagaccggatattggtaatgcagtgagggaattgagcacgtatttgtcctgctacaataaaacacattgggaagcagctaggagagtactgaaatacttgaaagggacgtcgacatacggtctattacttgacggaaagttaaaggacgtaacgtatgaggtgtacagagacgcaagcttcgcgtgtcaatcaaaataacgtaaatcacggaatatgtgattagatggctggctgcagtatatattggtgcagtagtaagcaaggatgtgtgtccctatcaactgcagaagcagagcttatcgcattgagcgaaggtgcaaaggaaagcgaatggtagtggcacttactatcggaaatggggtttcctcgagcgaaacctgtgcaagtctggtgtgatagcaggtctgctatcagtatcacaaagaacccaggcaaccacaaggctagtaagcatatcgagataaagtatttgttcacacgagacttagtagacgaaggccatctggtaattgagtactgcacaacagctagcgtggcagcagacatttgacaaagacccttcccactaaacaatactcatttttgagagataagatcggtgtgacaagcgtactaccagcggtgaacacttagtgagaatgttagaatgaggttcccgagaggccgtaaaggctctgtaaaggcttgagggtaaagtcactttactaaagtgtacccgatggcatcaagacgctctcccattgggtgacttccaaaaacctcgcaagtcaaaacttacgaggagcacatatcaagcacagacggcgaagcaagtcgagcacaaatcagtcacaaaggttggtaagacgaaaaaaaacgtctgagcaaacttgtgtttagttggcttacttgtgacatcagtttcgagaatgagaaatgcgatgctcctattttgaggacactctgaggtctactacgacttgtacgtttcggctagaatggctctgtcttcgacttgatcaggccgagccaagcctgatactcgactcctgtcctctctgctaccatgtgcaagaaaacaaaggggaagaggttccgctcgagcgaggtgaaccgtacgtcattcattatctgtgtgctgtgagctagatttgggcaactacttacacactgtgacgtaggaatgcttgacatcgtagaagaccgattgccgtttggtgccgagcagtggagcaacgttgccgctctttacgacgctcaacttcctagtggttggccggagcgcgacggtgagagcctaaagcgcaagttcctcggcctgaagaacaaaaggaaacccactggagacccagactgtccgcctgatgtgaagcgtgtgaagcaggtattctgcatgattgaggcccgctgtgctgtcactacacttcacgacaacgactccgacgaagccgagcccgacgaagagcctgcggttgcagcaggaggaacgttcggtggtgctacacctgcctcccaccattttgctgttgaaggagaagctgctggtcatgaagctgctctaggaagtggcgatgacggggtcacggatggtgctgcttcgccctgtattgacacgtcgcccgtgtggttcgtggagacacccccggaacggccgcagcgctatcgacgccgcccaagctggtggctacatctcgtgctggcatattgcctacggagcttgtccagctgtctcgtagtctggaaaagccacgacccaacacttcgtcaccagtcaatccaacaactttcatgagccagacagctcagcgccgaatccggcttgacaatatgctcgacaagctagccgcggatcttcctgcagctcattctgctggtgattcggggctgatgagcatgttcatgatgatggaggagaggcaggcacttcgtgacgcttctctccgtcgcgagcgagaagagcgagatgccacacgcgaggagagagagtgtcaattccgactcgagatggatcaacagcaaagcaatcgtaatgcccaaagtcaacaactcatgctgctgatcatgtcgaagctgttaggcagcaacccacctagcaccgaggatgcctagaagaaggtcgcgaacgacaattttagcaaagtcagtagaccagaaaagaagatactaaaacaagtcgaatgagatagatttattttgctttagaaagatttactttattccttacgccatgaagacgcttctgatctggctgatgcctgtgctacgtactctcaaattgtacaagtgatagatgttgaatatccggacacttcttcgcgcagggtcaaaaggcagcggaagtaaaagctgcctgtagaatttggaagcgcagcccattccccactcggccgcttggcgtattgatgtaactgcgctgctcattgccaccaatccacctcagcaggcagcactagccttctccaggtcaccttctttaagaggagtaatgatccttcccgccatgccatttctaaccgggaatgcagagtctgtcgcgcagcacgcgttcgtcatggtcctcttagcgtccgcgactcgatgttgtaagcgacggctcatttcaccgtcgttccaggagcccgggtggttgtggcgaccccatacaagagttccgtcaaagccgcagcacagcccgccggtgaccttcactgcatgagccatcctgcttggacaacaaattcaatcagtcagaaaattctcatgttttcatgatacgggcacttaccgttgaagtacgcgttctggtagttactagctgtgggggctcaaacgacgtagtttttttccgtcagcaatgcagacacagccttggaccaaaggctcgtggagcgagcgacacgctcgctgcccactgctgctgctgctggaaggacggtcactcgatgcgcgcctctggaacctcgtttagagccaactgcaccgcgttttcagccagcttcagaacgcgagatagcgtagcaggaggtacaccaaatagctcacaaagtgttttctgctcgaccgcagcggtgtaaaaatggagaatacacgccagtatattgttcacattttgcaaacgggctggccttccctttttacttgggccactcttcacctgatagtgccgaccgaatgccgccaataacatgttgaactgcagcacgggtaacgaaactgtgacgataaacgcgctgtcatcgcgcatcatgaaaatggtggaccagagactcgttgaaggctgatgaggacgtcgaaagtcaaatagtgcagatacgaagccgtaacagtgttgcaatgaccttcgctcgagcccgctgatgccgctgttgttggcggcgataggctgtttgtagtatcatagctgaagtgaagcgcatcgcgcgctgtcggtagtgattttgaaaatgaaagaccgtgaagctaccgatatgccgtcctctcccactgcagcttgtgttgtttttgaagggcagttggatcgcaaggtacgcacgtaccgcgcccaaatggaggagcaaacagagcactgatgacagcttgtgagtggcatatacagcttcatgtggggtttttggaagtcatccattggttaagggagagccaatcataggactacataactagccgatcagagggtgccctgttggcgaccgctcgtgcgatgatagtttgacggtattcggagagagatcacttctccttttgccgacgactgagcactagtctattagagggcattagagcatctccagcggtggggtcttatcctaagacgtaacagggtctttgagatcacaattttatagttgagacccgcgcaggccgacttactctcagcggtgagttctaaagcgagtcttataagtccgttcctgcatgtgaaaattgcattcagttttggtgcgaacttttaaatacggcgactcttcagttttgtatggatagcattaagattggggtcttattttaagactcgaaagcgaatctataggacccggtgaagttaaaacctgcaataggaccttctggtgggagccttaagtcttggccaagtcttaaaaccgtgtttgaggccaaccgctggagatgctctcaagagaaaaataaagtttaagtttgaccaaccagaactgagttttaacacagtcttctactacgcttggattcagatcgaatccgggtcgtggggacgtagtggttgatctaaccacagtggcgcgtcgcccctattagcagttgcacagatgctcagctagtattgccgcttgcaaatattttgcccactaagatagacctctaacatagaccacgcctgtctcttaatatgagtggacacgagatagtcgagggccattttagcgtgctttggtagaggccggtttttggcccagaaactcggattggcccgtctagaatggcatttctgcgtttccaagtcgtagcaaagcgtgaaacagaccccaaccttgcatcttagacctgcactggcgatatatataaatcagacctaggtcttaattaagagcttgctagactaaaatcgagattattaacgagataattagcatgcgttggccaaaatatctgcaaacggcaataacattaataaaaataaaacttgaaatggcgctaaattggttatgtcccttattcagaaatcctccgatgacttaccgtgcagcacagctcctaagttgtctcttttttggtagaagcctgcatagaacgcatagtcccgaatcagccggcatcatggaggacgtggggctcgaccggaagctggtgatcatcggccccacggacgtgggcaagacgtccatcacgatgcgctactgccacggcagcttctccacgcccacgtcggccaccatcggggcctcgttcctgcagaagcgcgtgatcgtgggcgacgacgccggcgcgcggcggaaactgacgctgcagatctgggacaccgccggccaggagcgcttccgctccatggcgcccatgtactaccgcaacgccaaggcggccatcctggtcttcgacctgcagagcgaggccagcttcgagaagatcaaagagtggctgcaaggtgcgtcttcttgagcgaggttcagtagtagagacggtagcgttagactgacaggctcctcctcctcttcctcctgttcctcctgctcctcctgctctgtcacttcaatccgcagacctgcagcaccacgtgggcgacgatatagtactagcggtcgtgggcaacaagagcgacgtgccatcaaccttcgacttctccaaggcccagcagttcgcggacgagatcggcgcgctggtattccgcacgagcgccaagtcgggcgaaggggtgcaggcgctgttcgagagcctcgcggtgcagctgctcaagaagcacgaccaggagcagcggacacgagcacgtgacggatccagagcaggaagctccgctggcgcaggctcctacggctatggaggccaaagtcccgtcattctaagtcaagccaacgcctcagggaacaaggcatccaagggcggctgctgttagctcgtctactggtcagcgcatagaacgacaggcatgaaggaagggaaaacagggtttcagctcgtgcacaggacagcacagctcaacaagcatgggggccggagggatgaggtgggggcagcagagagagaggggaggaagtgcatcttggcgtcggagtcagcgctcggggtgcgacgccatggatgctagctaatgtttttattcacagcaatcaacaagtcaagtttcgactgcgttatgacttgtgtgccatgcttctaggacactgcagctcctcgtcggcgccaacatattacttcgacgcaggatcaatcatcaccaaacaccaacacgaaccgagacgcagatgacgaacacgagctcattcatttcggttgtaagttcttcatttagtcgtcggcttccgtgctagctccgccactcgccgcgaacacgagcgcaaccccgttgctacagacacatgggcaatggaggaactccctctcgggtcaaccatcccgctagctacgccacgttcactcgtgacccccgcctgtcgtcagaagactgacttactgctggctcgagttggcgagcaatgtgttgatcttgtcgatcttggtggcgagcgacaggtcaatgaagtagttgccgatctgcaccttgaggccgcccaggatctccgggtccacgaccgtctccagcagcagcttctcgttcttctccacgcgggcaccgagggccttcttgacctggtccagctgggccttggtcagcgggtcagccgacgtgaccttggcctgcacctcgccacggtaggcgcccatgagcttcttgtaggcgccaatgacgccagcggcgtccggcagacggccgttctcagcgagcacctcgaacaggccagccacgggcttggagaacttggccttctccatgaccttggcgatgtcctccttcttggaggcacgggcgatcgtggggtcgtgcaggaacgaggcgaagttgggctccttggcgatggtctcctcgatggtgagcagctccttctccacagactcgagctggttctgcttggcggccacactgtacagggcgttggcgtagcgggcgtgcaggccgaagagctgcagcttgggctgcgtcatctggccgaagccgccgatctcctccacctccttcgtggacgaggcggccgaggccaggccgcgcgtcagggtgggggccaccgcggccttgcgcaccgagttcttgatcgtcgaggacagcatgctggcagtggcaggatcaacaagaacgagggcaaaaggtcagtcgactcccgctcggaagatttccatcgcttccggcgcggccctccggggcgcaagaggacggcgatacgcgcgtccgcttcgggacgagcgcgacacgcgattccgcccactgtgctcgtggatgggccccgctttcagcttcggacgctccgtccagcgccagcttcttccatccgcgcgcgcactcaccttccgttccagctaaagtcgcgagtggtctttgagcgcccagggccccctcgatgtgcggctccaagccactcagtccgctgattggtccgtttattcgtgtggtttacatacgttacataagaaagtgtaccttagaaacggtacagccgtacatgtgttaaacagatacgaagcttgtggttcgtccactagaaaaggacactagaaggctggaactccagggaagtgtgtcgtgcactacatttatgcttcgaagcaataccggacaagattgtcctggttgtgaaagcacaacggcgcacgggaaggcaggcagctgccaccccagaagactaagcgttgccgacaagaccgatactgctggtcgccgcacagcacgaggcggccgcaaagcaggccgaacgctgccagtgccatgtcaaagcgtgttgcccactcgctccagctacttcaaacatgcgctggcttttgcagagccgtcccccttcctgtcctcttcaattgctgatgttcgtcgcacagcagtgggcaaactaaatccgctcggctcacccgggccactcgcctgccactgtttcggggccttcttgtcggtccttccaggcctggaactgcagcgccacctgctgcagcatctgcgctttgatcttgcccaagtagcccacctccgccttcttctcctggagttgctcaaacgcggcgcgataccgcctctttgcgtcctggagctgcagcagcgggacgctttggcgctcgatctcgacctcgtccgccaggtcgggcgtgctgcgatctcgcagttcttgcagctggagcgcgtagccgtcgatctccctgttggattcaatgagttagcacaaatgtatccatctctagttgaagtgagcgaccaatcatatcccacgtacagtttcacgcggttgacagtcagcgccagcgctgcgtattgcgcctttgcctcccggaggttcagcttggcctgctctaggtcacgcagagcctcggcgccagggtcagcgccacccacggacttgaagcgatcgaacagctccttgtcgctctctctgggggcggaaagcgccgatgcaccacgctctggtctctggttgtctccaaaaattgggggcagcacaacccccacaccatcaagaccgttgttgttgctctttttgttgtcgttggcgctgctgctgctgctgctgctgcagttggtgctactaggcgcagatgacggactggggccaggcggcgtatgacctcgcagcgcgcggatctgcgccaccatcttgctccccgtttttcttggcagatttggtgccgggtcgagaggcgccttcatttccaggcaaatggagcggaacgtgagcagtagccgctgcagctgccgtagactctgaactggaggaatcagctcggcattggccaagaacgaggtgatctgctgccgtcgtgaactttcctcctgcgcagagttctccttggcttcgtgcgggatccgtgttcgccctgcaatcgcatcatacagcgccagctcctcgcgcagtctccggatctcatcgcggaaggcagcacgctcctcactagccagctttgatcccgctgcaccagacctcgacgccacaacgttgacaacagcctgcgtcttgacgcgacgcatcctcgccgcgaagcgcagagttgccagactttggtcggcgtgagacggagatggccacacacaagccaccaacagcgtgcggcagttgccacccagcgagtccttcagcaagttggtcagaggcgtctgtcgaaacggcacgtgcgctcgggtcttgctgcccagcgcgagcacgacctgctccaggaatgtcagcgaccggttaatgtagcaggcctcgttggcccgtgtcgaacctgcctctgtcagtgtcttcttcatacgttccgaacccgccaagtcaaccaaatgcagcttactgtacacgacgccatcttcgctgagcgtggatcctgtgacttcatccccaggtgcatcttcctctataaactggttggacattacactccgcttgcgctccaggtacaacgtgaagatacagtgagaccgagttgatgcggcgttcagtgcatgctcagccactgcgcgactcgtatcaccctggaataccaggtccaatgcctgctcctcgctggacacgagcgcagtcgtgaggccccgcacgaacgtctggccacgagcattctcctggattgccaagtcgttcgagccattgccagtgcccgagctaccgacgtctggggcaagcagatcgatgaggcggtcgttgtaaatctccagatacgacatacgcagcgtgtaggaatggtcggcgtcctgctgcgtgcgttggaatacgcgagagagcgctcgagcgatgagtccgcgatcctcgaagcggcgacggggcccccctccagacatggtgaaggttttgcctgctcccgtttggccgtaagctaagatgcagccgttgtagccactcaaggctccgtccacgacgtcggatgccaccaaccgaaacactccagcttgatctacgttgggagacagcacttggtcaaacttgaagatcgtaccgccgcccgaggctgcattggtgaccacactgattgtctgcacgcaccacagcgaggaactaacattaggccccgatgcgctcgatagttaatcgcagagagagagagaaaggaactaaacagctgaccttacctgctcgtgttcatcgatcacaactgcatcgctctgaactgagttggtggcgccttcgctagtgatggttggccggacccgtatgcagactttgacccgcttctgcattctagaacgccgagctcgcccttgtcgatccagcggatacccagcattggtactcgtaccatggcgtcgcttcgaaacggtcgtgcaggaaacgatgtgtatggcgaaacgtaccgtggtcctattagtttatcctgccaacttacttgcgcttgatggcggcgctgagatccatgtcctcgtcttcatctgagctagactccaccttctttttcctgcccttcttgagtggggtcttcttcactggctttgcgttcttctttgcctggacgggttcctccggttttgctgccgtgccaaactcgctctgaagtactcctccctcctcctcgctgtcgctatcgctgtccaccacgggtttcttcttggcgggttgggcaggcttcggctgctccttcttgctgccgtggatcaagtcacgcacagtctcgctgttggccaattgacggaattcgtcccgagccgcatcagtcatcgcaagaccctctgcagctggctttggctcctcctcggcctgatcagcagcagtctcgagggactccagaagctcggccatcgacgtcacctgctgggcagtctcctccttcgtcggttcgtcgcgcagcgcaatgggagcatgcagagtcgagaaatccgtcattgcacccaaatcgaccttctccaccgtgcttttagcggtcgcttcatccagcgtcgacgatacatccgcgaatgcgcggccacgtagcaatgcgcgacggcgctgcacggcttccttgtcagccttctcttcctcctccttgagaaaagtcgtcagttcaacaacacgcgctgctgccacattcgcgcacctcagtacagtcgactgggaaatcgcggcaccgccaatcttgtgcactgcgcacagctcgcggaacgagttgaacgtgaagctcatgcgcgcgtccgtgatccgctcctcgcggtccgtagggtccatgaagataatgggctcgccatcctcgtcagcgtcaatgtcgtcgtcgttgccggcattgttctgtattttcgcagctggctgcaggaagcagaacgagatggagatcgggatgtggtggagactgagcgggacagccgcgtgctcgtccacgctgtacacggtgactcctccgttgcctgccgtgccctccttcactgcaacctccgggcggcggtagtgcatgagcgctgcgatggcagccagcgaggccgcgtccacgaggttgccgccgtggtccacgacgtgcacgtggcacgtgatggcccagaccttctctccagccaccacagccagcgcctccgtgtccagcgcgcgactctcgcgcacgccgcgctccaccaggcgcgccagctccgcggcggcaacggacgaggcggcgccgcgacctgcagaagcggcggcctcgaagctgggcgacgccatgggcgacagctccacggcgaagtgcaggaagccctcagtcggccggtccgggaagggcggcacgatctcgccatgcacgttgccgatcaccctgttcagcacacaacagacaacggccagttaggcgccttccgctactgcagccatgcacggagcagcgcgccccacgcaccgagtgcggcccagctgcacctccgcttggctctcggtctcgctgcgccggaactgcacgcggatcttgcgctgctgcagcagctcgcggccgtcggcgcgcacgtgcggcggctggcgcaggcagttggccaggaactggcgctcgttctcgctcaggaagtcgtgctcgtcccgcagcgccatggcgtcggtctacagtagtggttcgggagctgctggtgcggagcgttttcggtctccgaggccgctgattggccaattctccaccagatcacaagtccgacccagcggggaatggacgggtacaggcagacgctgctggggcgcgcgctggccgacgcgctgcgggatctggaggaggaaacggagctggaggtggacggagacctgctcttctcgctcttcgacgaggccatgctggcggagctgcgcgcggagacgccgggtcggacgttcactcacgagtcgctggggctgacggggcagctcacggccttcaaccgcttcctggacgactggagcgtgcaggcgcgcgttctgccgcgagatatcacgctcaaccactgcgtcgcggacctgcacttgccgcagcagcagattcggggtcaggaaggggagcaagcggtggcggtgcggatgaaactacgtcagaggacataacgccctggtttagctctagcgctgtgctgtgccgggtttgttggtgtacatgtacttgttgtgatccgcgaattgcacatgttacaagccttcacgcagaattttggatcggtcattccaatgtggcgacagcaggaactcgacgcagttgatgaagctgcttgaagacaaaacaggagcagcgaaacttcattctctcgattggaaaatatcaggggagggctccagcgatgcaagctatacgaaatggattgccaagtgcctccactggttaacccttttggagtactgtagcgcaaagctggtattttcgtgattcgcgtagttcaccacatcatgctgcgctaggaacgatcaggtgtttggtgtcggatacttttgtagagctgctgcttcaacaccacttgcggggctgtactccttttcattgtaaacttaattagtgatgtcttctgtgaacgatctgatacttttctgttagctggacgtgtttgggtattgaaggctcatcaaaaggctgattttcgtttcgcagcagcgtcggggtaaccacgagctcgcccgcaatgtggagctcttgtacgcatagcatgcactatattgataaagtctgcaccggatgctgagtatctacagggttataacggctctacggtcaaacgtggcaattattgccaggcaatacctttgccaagagtggaggtgggcccgtcaccgctcctagatcgccggcctcattgctcgagcgctgtctcgcgtatttcaacgcacgtagcagtatggcgaccatccccgatacaagctgcgtatgtcgtatctggagatttagaacgaccgccacatcgacctcatcggcagctctggagtcgctggcaacgcctcgtacacttttatcatcgcagaagagagcacgtggacagacgtgcgtgcgtggtcctcagtgaggtcttctcaccactgcgccggtgtctagtgaggagcaggcagacataagtctcgcagtggctgaacacgcactgagcgctgcaccaacgcggtctcgctgggggttacttaattgtgagtacacttcactcacttccgagtaatgccacataaatcttgtttatagcttaggaaaaggttccacgtccagcattgccactttggacggcataatacgaatgtatctggggaagtagcacatcgaaccacataatatgtggttcgatgcgctacgtattatgtggacgtgagcaagctattagagaattcaagcgtcctctagcataaaatcgagcaaaagctgtcctaagttatacggtttgcagcacattatttgcgtccgtgaatgccatcccaacaagctatggctttagagtggggccagtagttgcgagttgatgcaatgtcaaatgagttatatgtactccaaaacccgagtccattactcactactcgaaagtcggggaatattcgaatactcgaaagttaggacgaccctggcatattcacgttgcacgtggagcgcgagaggagcatcatgtccaccagattctacgtcaggtgcagcggctactgcacacgcacgtcaatccagcagcgatttagccgaggaaaacagggagcaagatgctggagcagatcgatgcgctctgcgtggccatacaccgcggttgcctttgctggtccctccacggtctctggttgtctcgaaagcccccccccccccgctgcaccacccgggtcgttggtgttgttgctgctacagcaatggagagagatcttcgatcgcgatgctgggatgcgattggtcgatcacttcaattacagatgtagagatggatacacttggtgactcacattttcaattaactgccgtccgcttcagctgccgggactgccgcgatcactgcgaacaatgcaatcgctgcaatcttgcccgatgtggagagcaatagcgacatcgagcgccagagtgccccgctgtcgcagttgaggacgcgaagaagcggtatcgagccgcgttcgagagaaggtggaggtgggctacttgagcaagatcaaagcgcaggtgctgcagcacgtgcgctccaaaggccccgaaaggatgagtggcccgatggagcagaggtctccatgcacagccgtggacaccaaaggtgtccattgctgcgcgacgaagatcgggctgcaattgaagaggacaggaagggggcggccccgcatagacacggtagacgaaagccagcgcgtgtttgaagtagccagcatgccatgctgcatgcgctgtctcctggtgctggtatggtagcgtttgggcttcttggcggctggcttgcattattttcgcgcttgcaccccagtggttgggtcagcagcagcacatcttccctaacgaagtttcagcggcgacggcggaggtccccactcattactgtgggcacttgtgctttcgcgttgaagttggcctcgcatcgacgccgagtgctcgtcgatggtgaaggcctggtgtgacgaagcaccagttcgcctccgattgctcatgctgcccttagcttcaaggtggtaagcccacgcgccgctgttaaggacaagtctttccgggacgcagcaatgcctgccgggcggtctggagcacaaagcggaccgcaatgagtggtgatgccgacgtcgcccgcgtcgccaccagcgaattgcttggccacaaaggccacgcgcggagtcgcggcctgagacgcgccagcgcgatttaacacaccgccggcatgttttttgtcgctgacccaacatggactccgagccgttttggtgcgtcagagccacgcgccgcctcgccgaggaccgatggaaaatgcccacggtggtttcgtccggcctgcttgtaaatagacgcggggcccaggttcaagcgagcggagaacgccggccggcgcgcgccagctccagcggctccgcggcggtaaggaaagcagcgtggcggcggtagacgtccaggtcaccgtaggtcggggggggggggggggtnnnnnnnnnnnnnnnnnnnnnnnnnnnnnnnnnnnnnnnnnnnnnnnnnnnnnnnnnnnnnnnnnnnnnnnnnnnnnnnnnnnnnnnnnnnnnnnnnnnncaagcaaagttgtcatgaatattggaggtaccagagagtacattacattccctaaagtatgactttcgtttcattcaaagttgtctaattcccaccaacgactgttgacgtaatgcacatttcccctcgcaaactcaagacctttggcgtactctgatagagtgcgaacttcgcactgcgaagtgacgccagcacagaggcaagatggcgaaggcgaaggcgtgtgtgcgtgcgtgcagcttcttgagtgtccgatccgcgtctgcatgcacttcatcaagcggcagctgtacgcgcgcgatctctcaaggaggggaacatgggggcgcgttgagaccgcccctcactgagcagggggtgagacgtgctttgcggctacatgtggtgcatgtacctctcgatgggaattagacaactttgaatgaaacgaaagtcatactttagggaatgtaatgtactctctggtacctccaatattcatgacaactttgcttgcaaattaggccaactatggccgggcaaaggtgtagctcgtcctccaacgaatcagcgtcgctgaggaggtcgcgaaccgttgcagcagcgctccgttgctctgtgatgcgacgcaggtctcgcagctccttgccgcgcgccgacaaccgcggcatccaagtccaagcccgcgaaggcgtatgtatggtgcagcaagctgtgagctgcaaactgacaaaagaaatcgtctttgttgctgcaaactttgatttggggtactcaattgacccaacgttgattggtcaaatatattcatgcagaaggctctacaaaataaaaatccttcttgttgctgcgaaattgactaccactaacgtgtagcagtgtagcagtttattttttggcataagcgatgaattatgataggagtttgtattcgttggcttaattctgagcggagtgaactgcgaaactatgttcaaagcgtgtcataaagtttttctaacgaggtgtagtaagcaccgagtcgatttctagtggcgcaaagtggcatctgttgctgagaaggctgcgctgagaaggctattagcgagtaccagtcacgtgcacgaagcagctagtgtacgtgatgaccatcgtcaaagtgcaacgagcgacgcgcagcaactgtagccaaggctctgagtgccaggatgcttccaaggaccaacagagcttcaaggagagacgacccagcagcaaggactacaaggaacaggatcgaggacggacgacgcaagaagggtacgtaagtactggtaaagatatccgaagcggcggcgaaagatagcgagcagcagtcaagacggcggcggcgacggggtgaacaagcggaggaagagtcgaagagaacatgacatcgaggatagcacacaaggggcgtggaagaacgaaggggtgagggaggcaacgctggaaactcgccgacgtgccacctcacccaaggcaacgaccaagaccgacgattggccaagatgtgttggtcagaagccgttggccggcacccatggcgcccacgccaccaagtgatggcagtaaaagtgtagtcagtatcgaaatagcgctgtagggtacagatcaacccatacagtagagccaagcagagtgtaacgtcaatacacgaagcagttggccgtagcaagtcgactaaggtcaaagtgcagtcgaagtgaagagcccggtccgaggtgacgagcagcgtgcacacagagtcacagtgcacacgtgcgtccatcgacgaccagtaccccgcggacacatccgccggaagggagaaccgcgagttgtgcgcgcacgtgggcacagctcacatagggacagctccagtcagctatcgcctacctgggcccgataagaagcggaggggtcgaggatcacgtgcgagcacctgggattggcgacgtacaaggcgttgtgcgtgttggatatcgcgtggagcggtgtatatttgtataggtgacgaactggcgttgctagccgccgaggaccccggcgctgcagagccgcggactcggacaaggtgcggacggtagctgcagaagggcagatcgcttactgtgtattgtagtcacatcataacgtgttgtacagaccacatggttgagtggtgccatgcgcgagctgcaaaagacaccagcgctccatcgtgaaattactgaagtatactgtagttcgtcgctttgccttaaacccctttgtcgttttcgatgattggcatggaagatcgccattaagatcgacgctgggttccataccacgcgctatcctaaccaacaaaaactagcgattgcagacttgaggctttattggcatcactaccgaatcgtgggggtccggctatcagcaaggatcgaagcaggctgagcatctgcgcatgtgactgcatgtatttaaaatatggtgactttgggttactcgtaatgagcctacgagaaaagcgaaaattaaaaagaatcgtttgaaaaaaaatattaactgagacaccctaatagaagtgagatgtccgccacggggtttcattcccttgagcatggccaacattgctcggatgttggtgttcacgcgccgaggttgtttggtagcatcatgcagtactggagcatcttcacaattcgcgttgggctaatttacggcgcacaccagcaaactacatgtaaaagcaagctgctcgctgcaacaccagccggaatcacggacagccagagagtatttgcgattattgccactgtactgttaatttatccacttcgctacgctccaaccgcgctcactagaacctccacgttccttttcgcgagatgtagtgtccagctaatgcaatgccacgactgagcaacatcctgtacaacctggagttttcatctgcaataggaaacgaatagcagggcgcataccttctagtgctccatgatctcgtggtggcactgtgcatgatctttgagcggcaggctgccactcaaaacgatcacaaagaaaaaaatggcaggtctcagcaatcatacctgtatgaaacagctttcgttcgcaacacgcggttttgtcattgatcgacatgacaactttttcctgactcagagagcatgtcttcacatcccaggaatccgtacaaacgtactggtaatggtgcaccgacagaacaatttgcacccaacagtaacacgccctacgtgtagcattccaccagcacatcggtcagtcactttttgccagtcctgccaaagggtgaactgcatttgatctcacttcggattttatcgtccagccagcgccagcaactcttacgcttaccatggccccctcacttgtgtcaacctgcatcgtcgctggtgttctgtctagcgcggctctgttggcgccaaccgcggacgcgcaccagatcgtcttgcagcctgagccccagtggactacgaacgacaaggaaaccaagtacaacccgctggccttccttgagaaccaagggttcgcgacccagcaagactttcgggagtggcgcaccaagaacggctacaagaccctgcgcgacttcatggaccatggcaagtacacggtgaccaagggcgccgacttctcttgcggttggaccgaccccaagggcaccccgcagcccattccggacggagacgccatgcgctccacgggctacacccacgatggtccgtgcgaggtctggatcgacaacacgcgcgtgctgcagggcgacaactgccacgagaagatcgccgacaagggctacacgatcgactactcggcttgtaagggcacgtgcacgctccgttggtactggcgcaggtgtacaaggcttgcatcccgctgacgtcgggatcggactccacgcagcagcagcagcaacagcaacagcgcctgcgggtgtaaaggggctgagattctcagtatgagtggtcatattcgtgtatcaagatgtcagcaaatgcgtgtttcttgctgttcgtttgcaccatagcgcaccggattacaatcgccatcaaaatgaggcagtgtctgactcattcggagcttgattccactatcgcagcattcattcaccgagagcttacgctagtacatgtaactttgatctcgaaacactggcaagagattgaagttcgagttaacacggtgagtatcatgggctccactaggtcgctcatcatggaatcggaaatgccaccagtgttagtacttggaaagacttagccaagatgccaagatgcaccggtttgctaatacaagttcaatgacagcatacactgccattcaagatcgtataaagagcagcgcacggcggacagcctggcgcgttgaagacccgccgcgcagaccgagggatggcttcgccggcacaggttgatgcagagcgtgggacgccgagcccgtctcggagtaatcgctccgtaagcgacgtcgcttgcagtagtaagtcggcggcgcatccacgctttgcggtgtgtctccgggagaggagaagccccctcgcttgaagccgcggacacttcaaccagcgttagcagcagcagcatcactggcgaagcggagggagggcccatccaggcttttggccgcagccggagccattgtcgtaagtgctcgtcgtagcgtcgagtgggtacgccgagcgatataatacagcaggcttaccgccggcgcagtgccatcatcgatggggattcccggcggttgctttgcgggccgagaaaaatcccgccacccgaggctcgggcgctgcgacggcctctttgcccacgcacagatggcgatcgagcgcgcgcgcacggcggccgagtgcctcggggcgcttccgcgtgagagagcgtgacagagactgcagcgtggcgcgcggccatcggcacatcggccatcggcggtgccttcgtagggccggctgagactgtattgggcggaagtcggtgcggcacgggcggcgattggcgcaaagtgcgcgttaagtcggcagaatgccattctgccgacttaaaatggaatggtaggcttctcaacgttcagaatgccattctgagaatggtggtcgcgcgcgattgcgccgggggtgaatcctcggccggtcggacaagcaatcccgtccagaatgaatagtattattggacgcaggtcattgcgataggaagttccttcagcctgaaataatacaccaagataagaaagtaatttaccacagcaatatcagctcacacagacagatccgaaaacaagcatcgactttcgcggggcgacatgtggcccttgaccgtttacgcatcgacccaggagcagagccgggccatattacgcaccgcgggcggtctcctttgcgctggacggacgcgattgcgccgccgccgattgattccctctcactgcccgccccgcagctctccatccatcactaccgaattggccaccaggaaggcaggcaagtaaggcaggcaggcagcaacctagctagcctctagtctatttcgacgacaccgaacgagacagcagcaacgaacgacaccaaccacgatgctcacggcccaccaccaactgtaccagcagcaccgccactcgaggtcgagctcgtccgctggcgcgacgcccgcccgcaagcgcgcggcgccctccccgctgcagccgctggccgcgctgctggagcagctctcgctacgcgtggccgccgtgcgccgctccaagcgcgacgtgcgctacgagctcgtggtggagcacgccgcctcgcagacccgctggcgcaaggcgcgctccttcgacgagtacaaggccttccaggcgcggctgctggcggcgctgcgcctcggccacttctgccaggccgagtgcccgtggctctacacgttcgtcaagagctacttcccgggctccgcgacgctcttcgggctgggcggccacagcgactgcgccgtcgagaagcggcgcgacgcgctggagcacgtgctgacgtcgctgcagaggttcgtggtgaaccgccagaacgcggcggcgtgctctgtcgtggccggcagcgtgacgcagttggtggcggacttcgtgctgggcgacgtgagtgacaagcgccacccgctgaacggactgtgcgggtgtggcagcagcagcggcagcctcggcagcctgcgcgacagcgtgtgctcgtccatgtcggtgacgtcggacgagggcgacgagctggcggacgaggcggcggacgctggcgtgtgcacgctgtgcaactcgagtctggacggcgaggcgttcggtgcctcgtcgtcgccatccgagacggacagcttccacagctcgtcaagccgccgcagcagtgtgatgagctacgcgacgacgctgtcgtgtggccaccagttccacgacgagtgcatcgtgtccaagctgaacgaggagatgcggtgccccacgtgccacgcggaggtcgactcgttctgagcgagcttaccgacttatttattcatgtacagcgcatgctgaggctacctcaacgataatatgaagtaatgacatcgtctacttgaacggcatccagtcactggaccagtggtgtttttgattaactttattgcataagaggtttcgtctgcggtgagtttttactagatagcgctgttcgactttgtgtcgttagcaggcagagtcggcgttgacatgatcggttgaggcaacctgggttgaagtgaagcagtgagctcccgtgcctccgttggcggaaaacgagatgcttgcagccaccgttgcacatatctccttataccacgtacggtagtgtacatgtatgcaccatcttcttcggcgatgcaagtattctttttctcaaaagtgccaagcgcgtctaggacgtctcgacgaaactttcgttgtcaccaggagttagcgacctaacgcgcgctcgctcacatggcccaacttgcatcttttttaaatgcggcgtgttgcaccaacaaccacagaggtttgtttcgtttttcatctacactgtacctaggaaacataaaaatcgagtaattttgtggtgaatacaaaagcagtcgttgtcgccattctaccttcatttcgttcaccgagaggaccatactcagcacattagtgtggcattgaagctgaagactataaatgatccgacgtgctatcttgttgctatctacctggattttgtttgccgagaagatcgtgctcagcgtacacaactggttaaatcattattgaaactgaacacggtaaagggaaactacttataaatactccccaatatttgactgctgaccgaaatgccacctaaccttcgaggaaacctgataaacctgcaccaagcattaagaacgtatgccgacttaaagcgggacgttttgtttgatagttttcattttaaaaaaatcggcgattgcttaaactaaagtaacaagcagaagacggccagttttcttaatagacaccttttgctcacgtattttacggattctgctgcctccctgagtttcgtaaattgtaaaattgccaacgacactttttgcccacgtatattcaattaggtacgaatatcaatcttcgacagggaatcgaggccagctaagtaccacacggactttacagctctagttgatggcccctggcgctagaataaagggtttacactatagctggagtcgtccgaggtgacgagaggaagtcgggttggtgctgctctcgtcctgagtgctcccagcgttgtcccgcaaaacctcaaacacataaaagtaaaaaccttcagtattgacaccggggagcctcgaactacgtgtacatcgggcagatgaacaaactctcgtggatgctccagcgttgacactgggtccaggaccagctccatctacccgaaatgggtctttcgtcacgcgttctaagaaggtgagggtcttgaaccccatcgtctatacacaagcaccgccttatagcaaacactagcgtttccgccttgtttgtgattgatttcagctaagcttagcgtgttcgtagagacagacgattttcatccgttcatcatgcagccgctcggaaatgtaaaagctgactggcacgaggaccaaatctgctctccttgaaaaatatttatctagctacgccttacggcgtacttgaaagatcgattagacaaccggtaccgcatgcagtttgcttgaagggcttttagtgttaacgtagacttacactacttagagcagcaaacaacggacgcgtttgcaatatatacatatcgttggtgtattgtcaaaagctcgaacatgtttgcagagtacactattctgcagcatgtacgtcatgcgtgtgtactaagattcacaagcggatcagctttatcgcgcttgacgaacagcccatccagcacaagatcacgttctgcaccaagtgcgttgagggatgcgattaaatgggatgcccagaagcctgttcagagccaagctgttggttatgaggcctacaacgagtttttgaccgccttgcggtcagatgtggaactatataataactgtgtggcggtagaaaaaatatgtttagcccaactgacccgggaagatcttgcctttaacgacggctgcaacacgtcaattttcatcttctatgatcaaggacaagtggatataatactcctcgttcggcttcacctcgatacaagcacagcggcgtcgtgcggttgatgcgcatgccgtcttcttgtacaactcgtaaaattactatagtaactcggtaaattactttatatacggtttccataaaacattatatatcaaaggtataccatgataaacagtatgtcgttctggaattttaccgaatgactttcccgaattttgtgcggaaacgtgtgctcgaaaacgcgtaaattacgtgggcaaaaggtgtctaatgcttggtgcaggtttatcaggtttcctcgaaggttaggtggcatttcggtcagcagtcaaatattggggagtatttataagtagtttccctttaccgtgttcagtttcaataatgatttaaccagttgtgtacgctgagcacgatcttctcggcaaacaaaatccaggtagatagcaacaagatagcacgtcggatcatttatagtcttcagcttcaatgccacactaatgtgctgagtatggtcctctcggtgaacgaaatgaaggtagaatggcgacaacgactgcttttgtattcaccacaaaattactcgatttttatgtttcctaggtacagtgtagatgaaaaacgaaacaaacctctgtggttgttggtgcaacacgccgcatttaaaaaagatgcaagttgggccatgtgagcgagcgcgcgttaggtcgctaactcctggtgacaacgaaagtttcgtcgagacgtcctagacgcgcttggcacttttgagaaaaagaatacttgcatcgccgaagaagatggtgcatacatgtacactaccgtacgtggtataaggagatatgtgcaacggtggctgcaagcatctcgttttccgccaacggaggcacgggagctcactgcttcacttcaacccaggttgcctcaaccgatcatgtcaacgccgactctgcctgctaacgacacaaagtcgaacagcgctatctagtaaaaactcaccgcagacgaaacctcttatgcaataaagttaatcaaaaacaccactggtccagtgactggatgccgttcaagtagacgatgtcattacttcatattatcgttgaggtagcctcagcatgcgctgtacatgaataaataagtcggtaagctcgctcagaacgagtcgacctccgcgtggcacgtggggcaccgcatctcctcgttcagcttggacacgatgcactcgtcgtggaactggtggccacacgacagcgtcgtcgcgtagctcatcacactgctgcggcggcttgacgagctgtggaagctgtccgtctcggatggcgacgacgaggcaccgaacgcctcgccgtccagactcgagttgcacagcgtgcacacgccagcgtccgccgcctcgtccgccagctcgtcgccctcgtccgacgtcaccgacatggacgagcacacgctgtcgcgcaggctgccgaggctgccgctgctgctgccacacccgcacagtccgttcagcgggtggcgcttgtcactcacgtcgcccagcacgaagtccgccaccaactgcgtcacgctgccggccacgacagagcacgccgccgcgttctggcggttcaccacgaacctctgcagcgacgtcagcacgtgctccagcgcgtcgcgccgcttctcgacggcgcagtcgctgtggccgcccagcccgaagagcgtcgcggagcccgggaagtagctcttgacgaacgtgtagagccacgggcactcggcctggcagaagtggccgaggcgcagcgccgccagcagccgcgcctggaaggccttgtactcgtcgaaggagcgcgccttgcgccagcgggtctgcgaggcggcgtgctccaccacgagctcgtagcgcacgtcgcgcttggagcggcgcacggcggccacgcgtagcgagagctgctccagcagcgcggccagcggctgcagcggggagggcgccgcgcgcttgcgggcgggcgtcgcgccagcggacgagctcgacctcgagtggcggtgctgctggtacagttggtggtgggccgtgagcatcgtggttggtgtcgttcgttgctgctgtctcgttcggtgtcgtcgaaatagactagaggctagctaggttgctgcctgcctgccttacttgcctgccttcctggtggccaattcggtagtgatggatggagagctgcggggcgggcagtgagagggaatcaatcggcggcggcgcaatcgcgtccgtccagcgcaaaggagaccgcccgcggtgcgtaatatggcccggctctgctcctgggtcgatgcgtaaacggtcaagggccacatgtcgccccgcgaaagtcgatgcttgttttcggatctgtctgtgtgagctgatattgctgtggtaaattactttcttatcttggtgtattatttcaggctgaaggaacttcctatcgcaatgacctgcgtccaataatactattcattctggacgggattgcttgtccgaccggccgaggattcacccccggcgcaatcgcgcgcgaccaccattctcagaatggcattctgaacgttgagaagcctaccattccattttaagtcggcagaatggcattctgccgacttaacgcgcactttgcgccaatcgccgcccgtgccgcaccgacttccgcccaatacagtctcagccggccctacgaaggcaccgccgatggccgatgtgccgatggccgcgcgccacgctgcagtctctgtcacgctctctcacgcggaagcgccccgaggcactcggccgccgtgcgcgcgcgctcgatcgccatctgtgcgtgggcaaagaggccgtcgcagcgcccgagcctcgggtggcgggatttttctcggcccgcaaagcaaccgccgggaatccccatcgatgatggcactgcgccggcggtaagcctgctgtattatatcgctcggcgtacccactcgacgctacgacgagcacttacgacaatggctccggctgcggccaaaagcctggatgggccctccctccgcttcgccagtgatgctgctgctgctaacgctggttgaagtgtccgcggcttcaagcgagggggcttctcctctcccggagacacaccgcaaagcgtggatgcgccgccgacttactactgcaagcgacgtcgcttacggagcgattactccgagacgggctcggcgtcccacgctctgcatcaacctgtgccggcgaagccatccctcggtctgcgcggcgggtcttcaacgcgccaggctgtccgccgtgcgctgctctttatacgatcttgaatggcagtgtatgctgtcattgaacttgtattagcaaaccggtgcatcttggcatcttggctaagtctttccaagtactaacactggtggcatttccgattccatgatgagcgacctagtggagcccatgatactcaccgtgttaactcgaacttcaatctcttgccagtgtttcgagatcaaagttacatgtactagcgtaagctctcggtgaatgaatgctgcgatagtggaatcaagctccgaatgagtcagacactgcctcattttgatggcgattgtaatccggtgcgctatggtgcaaacgaacagcaagaaacacgcatttgctgacatcttgatacacgaatatgaccactcatactgagaatctcagcccctttacacccgcaggcgctgttgctgttgctgctgctgctgcgtggagtccgatcccgacgtcagcgggatgcaagccttgtacacctgcgccagtaccaacggagcgtgcacgtgcccttacaagccgagtagtcgatcgtgtagcccttgtcggcgatcttctcgtggcagttgtcgccctgcagcacgcgcgtgttgtcgatccagacctcgcacggaccatcgtgggtgtagcccgtggagcgcatggcgtctccgtccggaatgggctgcggggtgcccttggggtcggtccaaccgcaagagaagtcggcgcccttggtcaccgtgtacttgccatggtccatgaagtcgcgcagggtcttgtagccgttcttggtgcgccactcccgaaagtcttgctgggtcgcgaacccttggttctcaaggaaggccagcgggttgtacttggtttccttgtcgttcgtagtccactggggctcaggctgcaagacgatctggtgcgcgtccgcggttggcgccaacagagccgcgctagacagaacaccagcgacgatgcaggttgacacaagtgagggggccatggtaagcgtaagagttgctggcgctggctggacgataaaatccgaagtgagatcaaatgcagttcaccctttggcaggactggcaaaaagtgactgaccgatgtgctggtggaatgctacacgtagggcgtgttactgttgggtgcaaattgttctgtcggtgcaccattaccagtacgtttgtacggattcctgggatgtgaagacatgctctctgagtcaggaaaaagttgtcatgtcgatcaatgacaaaaccgcgtgttgcgaacgaaagctgtttcatacaggtatgattgctgagacctgccatttttttctttgtgatcgttttgagtggcagcctgccgctcaaagatcatgcacagtgccaccacgagatcatggagcactagaaggtatgcgccctgctattcgtttcctattgcagatgaaaactccaggttgtacaggatgttgctcagtcgtggcattgcattagctggacactacatctcgcgaaaaggaacgtggaggttctagtgagcgcggttggagcgtagcgaagtggataaattaacagtacagtggcaataatcgcaaatactctctggctgtccgtgattccggctggtgttgcagcgagcagcttgcttttacatgtagtttgctggtgtgcgccgtaaattagcccaacgcgaattgtgaagatgctccagtactgcatgatgctaccaaacaacctcggcgcgtgaacaccaacatccgagcaatgttggccatgctcaagggaatgaaaccccgtggcggacatctcacttctattagggtgtctcagttaatattttttttcaaacgattctttttaattttcgcttttctcgtaggctcattacgagtaacccaaagtcaccatattttaaatacatgcagtcacatgcgcagatgctcagcctgcttcgatccttgctgatagccggacccccacgattcggtagtgatgccaataaagcctcaagtctgcaatcgctagtttttgttggttaggatagcgcgtggtatggaacccagcgtcgatcttaatggcgatcttccatgccaatcatcgaaaacgacaaaggggtttaaggcaaagcgacgaactacagtatacttcagtaatttcacgatggagcgctggtgtcttttgcagctcgcgcatggcaccactcaaccatgtggtctgtacaacacgttatgatgtgactacaatacacagtaagcgatctgcccttctgcagctaccgtccgcaccttgtccgagtccgcggctctgcagcgccggggtcctcggcggctagcaacgccagttcgtcacctatacaaatatacaccgctccacgcgatatccaacacgcacaacgccttgtacgtcgccaatcccaggtgctcgcacgtgatcctcgacccctccgcttcttatcgggcccaggtaggcgatagctgactggagctgtccctatgtgagctgtgcccacgtgcgcgcacaactcgcggttctcccttccggcggatgtgtccgcggggtactggtcgtcgatggacgcacgtgtgcactgtgactctgtgtgcacgctgctcgtcacctcggaccgggctcttcacttcgactgcactttgaccttagtcgacttgctacggccaactgcttcgtgtattgacgttacactctgcttggctctactgtatgggttgatctgtaccctacagcgctatttcgatactgactacacttttactgccatcacttggtggcgtgggcgccatgggtgccggccaacggcttctgaccaacacatcttggccaatcgtcggtcttggtcgttgccttgggtgaggtggcacgtcggcgagtttccagcgttgcctccctcaccccttcgttcttccacgccccttgtgtgctatcctcgatgtcatgttctcttcgactcttcctccgcttgttcaccccgtcgccgccgccgtcttgactgctgctcgctatctttcgccgccgcttcggatatctttaccagtacttacgtacccttcttgcgtcgtccgtcctcgatcctgttccttgtagtccttgctgctgggtcgtctctccttgaagctctgttggtccttggaagcatcctggcactcagagccttggctacagttgctgcgcgtcgctcgttgcactttgacgatggtcatcacgtacactagctgcttcgtgcacgtgactggtactcgctaatagccttctcagcgcagccttctcagcaacagatgccactttgcgccactagaaatcgactcggtgcttactacacctcgttagaaaaactttatgacacgctttgaacatagtttcgcagttcactccgctcagaattaagccaacgaatacaaactcctatcataattcatcgcttatgccaaaaaataaactgctacactgctacacgttagtggtagtcaatttcgcagcaacaagaaggatttttattttgtagagccttctgcatgaatatatttgaccaatcaacgttgggtcaattgagtaccccaaatcaaagtttgcagcaacaaagacgatttcttttgtcagtttgcagctcacagcttgctgcaccatacatacgccttcgcgggcttggacttggatgccgcggttgtcggcgcgcggcaaggagctgcgagacctgcgtcgcatcacagagcaacggagcgctgctgcaacggttcgcgacctcctcagcgacgctgattcgttggaggacgagctacacctttgcccggccatagttggcctaatttgcaagcaaagttgtcatgaatattggaggtaccagagagtacattacattccctaaagtatgactttcgtttcattcaaagttgtctaattcccatcgagaggtacatgcaccacatgtagccgcaaagcacgtctcaccccctgctcagtgaggggcggtctcaacgcgcccccatgttcccctccttgagagatcgcgcgcgtacagctgccgcttgatgaagtgcatgcagacgcggatcggacactcaagaagctgcacgcacgcacacacgccttcgccttcgccatcttgcctctgtgctggcgtcacttcgcagtgcgaagttcgcactctatcagagtacgccaaaggtcttgagtttgcgaggggaaatgtgcattacgtcaacagtcgttggtgggaattagacaactttgaatgaaacgaaagtcatactttagggaatgtaatgtactctctggtacctccaatattcatgacaactttgcttgcaaattaggccaactatggccgggcaaaggtgtagatgactactggcagctggaactcgagcgcgttcaatcgacgcgttatgtggattacccggcgcaataccgacggaggaatgatcgctggctgaagctgttgcgcgaccatgattacatgaatgacactgagttccacgaccattttcgacttgatcgtgacgtgttttatcgcctggtggagttagtgaaagatgatccagtgttcttcacaaaggggaacaaaccatttcgtggcgttctagtctccgcatatttacttgagagtttagctccggccacaaattttggttaatttactaggacgcaggatgtacatgttcgcaaatggagctgctcggtgttgtgtgtctccaaaatggtgagaaacccgtcgaggctggtgactaatagttcaagtgcatgtatacagatgggtttcgcaccagaaatcctcagctgttggtgaagctcgcacagtatcggcgatttaaccgaatgctttttttatatttgccaagcgcaactcgagtcacaagccgtcactgaatagtgggaagacgatttgttttccaggcaggcagtataccaccagagattacccccttcagttaccgcttattaaatattagctatcgcgaaatcctagaactactgtacagtaacgttaggaatggcatgttcagtctagccaaattagacgatggtacaggctgtccgtgtcaaagatgtggaagcctcggtcgttcttcggcgcgaataaaagcaaaaataaagaagcctacattttagtgtactcaactcgcagacaacacgcctgatctacttcaagtgccgaacggagtacttgcgcgtgcatgcacgacgaataactccaaccgagtcctttcaactgcgtcgacagtgctctgtgttttatctacgcgtcgcagcgagtaaaagtttttcagtatcctcttgtagtcagcgactgtcggccgagatatcgcccagcgacatctccgccgaccaggtcttagatgatccaagttggatccactccggaggaaagcgaagctgggagatcttggaatgtctataaaatcgcaacatcatcaccatggatagacgaacacctgcatgggcaatatgaaatggctttgaatatcctgccggacaatgcagtactgtatttgcagtagaaaaaataatccttgacaattcgctgtatccgatgctctaccgacaagcagcagtatcgtcagtaggcacaatggacggataaggccggtcacccacgatagtcgtaatggaaactgaggatctatgacgacgagaatgatgctcaacctcttctcatacacactaatttctcctctacgatattacacgtccagcacgtttttacagcggatgctggttgcaacggacgtcttctagagtacacgtgccaaggtgagtacaacacatatccgtacagtactatgtagtgaacgcatcgaacagcaccaataaattggtcatcttcaattacctgctcgcaatcaaagctgaccgcaccactttgctggcctgcatcttacacttgcccaatacagtactgtataatagcgggatcggttgcccccaatctcaaagcaccggcagaatttgtgtcctgtgcagtgataccaaagcggtggcgcacaatttacaccatcttgcatcagcgaagaaaatctgctggttttattgaacagctttcgggcgctagagccgtattgttgagacgaagcttcatgtactttactgatccgagcccaagcaacgatttggagggacatgcagcacttgcagccacttggtacagcaccactcactttccgttttgcgtgcttcattccaagactccccactccagaactcatgaagctttcaagcgccaccgtcggactcgcagttgtcactgtctcctcgattggacctccttccgtggcccaacaaccaggcagcaacgtcccggagaagcacccgtccctgccatcgcaggtctgcacgaagatcaccgatgtcctggctcaagtggatcaggcggactcgaaggttgtcaagtgcatcaccgagaaatcgtccgtggtgatcgatgccaactggcgggacatggtcgctgttagttccaacgaaagctgctacgccgacaacgagtggaactcgacgacgtgctagaccccgaaagagtgcgcgaaaatctgcggactggaaggcgccgactacgctggcaagcacaacatcacaacctccggcgacacactcaacatgaagctggagacgactggcggcgtgggcacccgcgtctacatgctggacgcgtcggggaagaagtacaagcagttcaagctgctgaaccaggagttcacgttcgacgtcgacatgtcctcgttgccctgcggctccaacggcgctctctacttctccaagatggacgcagacggcggcacctcccgcttcccgaccaacaccgctggagctgcgtacggcacgggctactgcgacgcccagtgccagaaagacgtgaaattcatcaatggcgaggccaacctgaagagcacgtacggctcctgctgcactgagatggacatctgggaggctaacagcatggctacagcctacacgacgcacccgtgctcgaccgatggccagcaacgatgcatcgacgacgaggactgcggagccaccgacgagacgcgctacacgggctggtgcgataagcatggctgcgacttcaatccgttccgcatgggcaacaagaagttctacggccgtggcaagaagtacgagatcgacacgactcgcccctttattgtcgttacgcagtttgtgacggccgacaacagcggcagaggcgagttgatcgagatccgccggttgtaaaagcaggacgaccgtgtggtgcgcaacccgaaagcgacgtggcccgcgctgaacggcacgaatttaatctcggacgacatgtgcaacacgtccaatgcgtatttcggcgaccacccgtacgttatgggcggcttagcccagctcggcaagcaaatggtgggcggcatgactttggctatgagcatctgggtcgactacgggtcgaacatgacgtggctggacagttactcgactggggccaacccgaagacgcctggagttatgcgtggtagctgcctgagtgacggtggtgaccctgagagcgtgtttgcagagagccccgacgcgacggtgaagttcatgaacatccgctcgggcgattttggatccacctactaggaacaggagacttccactaacaaaaggcgttgatacatggtcgtattgtgaggtaatgcaaggattgccgttgtttgtaaattattagaagtactattattaatagtactgcttcaaactaggatatccgtcctagtgcctatattaccttaatgaaggacccttaatataggatgcatctctactcgatacttaatgaagcggatgaagcctaatcaacgactgcgctgtgcgctactttcactagcttcaagtactgcgaagcatgtagctcgtcttctggcgagaaatcggtgagttgaccccaatgctcgctcttcatgcgtttcaggatcgagatctccccatgtctcggttgttttgagcttagataggcggtcgacattgtttccaaaccttctatcgacttgatactcttccttcaagctacgatgctgggcccaaattttccctaccaccgaatcgccgtactgcctggtatatcggtcttcatgcctgttaaatgactcggcaaacgcgccatgagtgataagagcagattctttacgagacgccatggcgtatactgtgtcctgggcggacaacgtaatgcccaggaccccgtcaatagattcctgtttagcatcacgaactacgagaaccaagccaaactgtctcgcatctcttaaattaaagttcactcgaaaacaatgacgccttatactcagtcttcaccccacttaagcatcagggcggttctggagcgttgtcactagcttattgcgggtactgctcggatacagtgacatgtttgtactgcagttactcaaatcataacttggctggccgcgcgagatccgtgaccacagacaaactatccacctcaaactgatcgaaagcgagcaaaccctttctttttgcagcgcaaccgattttaatagttgcgcttgagtgtcaaaaactcgcaggagtcatagatagaatcccaccgggtttcagcatagtgaagacagctccctacactacgtttggtagacacgtgcgtatgcgtgaaagacatatctgaaggatcgtgcgaaagtcacaacaaagctgtctaaaaccaagagcaattggttcatggccaggtatagttcataacggaagccgcaattggtatgtagccatcctgttaatacaggacgctggcagagccttaatttaggaagtgcgcccaatttatgttcatccttcctacagtgacacctccctaaatgaacccctctaactgactggttaggattcctcgactgcaaacgggattatatggatttcactataggtgttctataagtgatcaaaaacctctttattctctaaatggtcgccattgttggcgccacaaccctctaaatggacgccgtagtaatagatccaaactcatatatttttctcaatcacttgcctgcctcctcccacgtatgccattgctaccactactcccgccacaacaaatcgaacgaagagagaaattttatttgggatgctaagttggaacaaagagtttgcagtaactgcaagcttgtaaatactgataaataagctagccacagtattttacaatcagcgcagcgtacatatatatattacgaaaaactaaaatattatgatgccgagacaactaggggctgtacagtagataccaagcaaaagaaaaaactgcaggcatggtggcatatcgggaaaacaaatattcccataacctcactgtattgaaactcacgtacaacctgaggggatgcgattctgctaataccaatgagaagaaggagtaggaacagacaataccgcgcctaccgttattggttaagttctgtctgtgtgaagacgaaacaaaacaagagtacgaaaatgctggaggggtaccaggtaaagaaagcccttgtactgtgcacctaacatatgaaaatgtagccattagaagtgtagccatttctttatctgatcaattctttaactgaaacagcgtattagaccgagcgaactgggtgtcatttatagaggtgtgactgtagtttgacgatgcctgactattaaacatgctttagggtttcgaacactcagaagttgtcgatgatgatgatgaggtataccgtattggacaagggggtcaataccgagtcctaacagtcctactgtagtggtttacccttgaccgattcactactcacttcttttttgctgcccaggaactcacgatgattatctgcaccgaaaaactcgaggctttgttgcagatgctccaccattttgggggagcgtggagtggagttgctctggattacttcgaagtagttacatgtatgtgaactacagcgagaaaaccaaatatctcaatacctcacaaggtttacagacatgtaaaactagtaattcgagtactttgtattgagggattgtccatgtacacaacaatgcatacttctgaataaatagtcgagtacaattgaattcttgccattacgtagctttgaactacagcactacttcgaatcaactgaaactgtttgcgctacttaaaactcttaggggaatgaatcattgccaacgctcaggagcaaatggaactacgggagtatgtaaattgcgcaacctacgttattaaagtaagaattagatttttttccactcttttttcttcttatacatgtagatgcatgttgtactgagtcagagcaggttactgaaggggtagtcatctgagatagcctatatatctaagcccactgtgtcatccgccacactttgtggcattggacaccggccaaagtacacagagcgaatcaagtcaatgaatctgaggctgtaacgcggggtttcaaatcccttctacgatcatagggattcgtcaacacttttgcctgtgattttaaccgaggcactcgagcagttctctcatttaccaacttaccgcaagccccctccccactccttcgacatcagcgatggctacccaaccagctccgtacaactccaccatcgagccgaatgccgacgccgaattccccgccgagaagggccgctaccacctctacgtgacgtactcgtgcccattcgcctgtcgagcgctggccgctcgcaacctcaagggcctcgaggatgtcatcagtctctcggtagctcacccagtgtaccagaagagcaggccggacgacgagagcgacacgcacttgggctgggtgttcgttgaccccgagaagaccccgaccgtcgtcgggttcaacggcaaggagtaccccaccgccgggtgcatcccagacactgtgaacaacaccacgttcgtccgggagctgtacgagaaggtggacccgacaccacgcaagttctcggtgcctgtgctgtgggacaagaagacgcagaccatcgtgtcggaggagtcggcgggtatcctccgcacactcgactctggcttccgtgatttggtgccgtccaacttccagctttacccggaggagcagcgtggggagatcgacgctgtcgagaacggattgctggcggagatcagcatgagcctcatcaagtcactcttctccaaagactcggagaccgccctggtggagctggagaaaggcttcgtgggcatcgccaaactggaggaacttctgtccaagcagcggtatgtcgtcggcaacagcgtgacggaggccgacatccgccttttcaacacgctgatccgcttcgacgtttcccagaagaagaccaacgagcagaacctcacgcaatttcccaacgttgtcggtgtaagttgctgcggtggcgatgctttggattgtggcgggagtttgtactaatgcgtgtgttgcattttgtgttgctttgacgccagtacctgcgggacctgtaccaaatccctgccatgaagcgcacggtgaattgggaccacctgaagattgctattgtgaaccaccgaccggatgcacctgtcgctgaggggcctttcattgactacgatgctcctcacggtcgcgactaactcgagccgatctattttttttgcgtccaatgatttcaactgaaaaaaatgaactagctcgaattttatttttattgatattcatgataatttcaaagttttgggctgtttgaagtgatatgtatgaagcttttcagaccttattaccagcaacgtcatatgaagtgatgagctcacttaatctctccttacacagagtgaagagccatcagttactctggtgtttgccttctctcgcaccttgtacttccactttgctgcaaagtatccttgggagtggcggagcaatcggtaacagcagtattttgacgtgaaagctaaacagaggcggggtagttggcactgcagtactcctacgtcaacgtctacgcccaatagttgcattccgctaattgcattccgctgatcaagtaatcgtaatctccagctataatttagcgagacacagtgcgtttggatgaaatatgagttgatgcattccaaatagaggaattctgagcggaaagctcgccccaattttcgacaggaaggaatcatgtaggcctggtgggaccaaaacagaagctagagaatagataaactgctagggttgcctttaattcatttacagggcgttgcgaagttgataagagcaatgcaacctgcgttgcacatcattgtgctgccttctatgccactttcaaaagatcgcaaggtgattttacgaaatgttttagcgagccacattacacagaagtcaaaatcagcacgacgtgaaccgctctgtgtgggtcatactctactgtataatacatctgcatactttagataacccaggttgtcagcatcgccctttggacttcgtagaaatcgggatctgactcacgtgtcatccaacagaaattacaacttgttgctgttgtgacattctactgaaagctgcagcacttcacattcctatcgagagggaaaacttaggtttttgtcgttactttcaattgagaaaccggtcttctttctcataattagcgtgtgtgactatctcgatggctggacatgtactgctgcatcttagtgatcggtaagaaaaaatgatgagactacttcgaagtagtgtttagacttcagtaaagtattttttaaagcccaaggacttcgacttttaagtcgaagtccttggtgatccgttagagtaattgaagaagtacttgtgctatcagtactcgttagttatatggcatcgtactgatgttgcccaacgttttggatttctacacttttggaaccttagtttattgccatatatcccagctaccggtagttcttagctcattaataggaaacaagattttagctgccaaagttttgggtgggatttcttcctcagtgccaagaagaagaagaagagcccatagcgaattcacaaaacatgtacagcataccagtaattgcaccggggctacagtagatcgataactcatgttacaaagtcggccaagcattattatcgactcgtacgacttattgatgtgctacaacagcttgctcaaacttgtccttgtccgccaatacgtgtaccaacttggtattaccaagtcaacgttttcgcatgagagatacttggacgtccctcgtgctgctgccaaccctcgcattccgcaaccaaacagataacgcgatcaaagcccaagtacatgtatacatgtagtagtagacagcgcgctgtcgttcaaatccaatgcacaaacagatggaagcaggagccttctctgtttgctgagtctcgattttgctgctttgcagagtgatccgatggcctaaaccagccactgtcgttcatttctcaatctgccccccccctacccaagtgcgttcccgacgtggcggccggcctgcaagcatgaggttctacgtcacggtcctggtagttgcggcctgcctcgtcgcctcatcccacgcgctccccgcagaccaggcggcagtctcccgggctacgtcgctaactgaggctttctccgtcgtcgacaaggagggagttgaggagaagcggcgcctgcgattcaagtcgaccaacaagggtaaagaagacgacgctaatgaagaagtagaagaacgaggcggtggtttcaacctcgacctcacgggggtggggaacttgttcaaggctaaagacccccagggaatagcagacgcggcgaaaaaagccgctagtatggagttctgggggaaagtggcgaacaggctcagcttccgacgtgagcgatttccttcgtggcagaaggacggtatggaggtcaactcgatcatcgcccaactggaggcccacggcttcacgggcaaaaacttcgacgaaatcgccaaaaagtacgcccacttcaagcagactggcgagattttgtaatctcctagatgctagaaaaacgtgtgtagtggtaagcagatcaagaaggtttcttttaaatgttcagactcgagtttagtgtgttcatactgtcttcaaagtggaaattgaactcttattggtgagttgggctgatatgctaaatgacttgttagtagggtgtactacaacgatattctcgcattagattagccacgaccaaaaagatcgacagaccgttcggaatctagaacacgcatcttgctcgtttcggaccttgttcgtgccaagaagccaatatcctcttttgctggcacgtagcgagaccttttagatcctataatttattcaaccaaatcaggcagtattgtaaagcttggcagcaagggcgtgaagcatatcgaggcgaaaaggttacggtaaagactcaggcgaacttttaaaataattgcttttagttgatcttgctgacagatcacatttaattttgccaattctcaccccttacaaaaatggaggaactgaaaaaatacttcatacatactgtatgatagtttggccttttatgccattagctataccattagcttgtgctattactattcgccacgagttctctgtccactagcaatgaagattgatgcatattcagcgaaatgttttagttggaactaaatgggaagatactacgtcattaagggatgaagagaatggtttttgatttacctagctaaacgataaagtcttcggagttttcttggggagaaactaagggtgcatcagtaataaaggaacttggtcaaacaggtcgatggactcgaagcgcttcgccctcttctgtagttctacttcgcatttcttaaaaggtaaagcacctctgtacatcatacgaaatatctggtttgccaccgcgcaaattctggcacccagcgccgtccaagtggagtagcctgctaattttcgaaactactaacgaaagcgcgagtacagacttaaaaaaaatgtatatgcaagttgcgagcttgctggcgacttgaaaagtgagactgaacaaaatctctcggttactcaaaatctcgtggttacccataacgtacttacaacaagcttgaaagttctgtgatggaaaaacgaaggcacggcttatcttaagtttcaacctggtcgtacagcatatcgttcccgtttggatctcaccctgcgccaaaatctgaagtgtaggatagaatcagcgatgagctcgtttgctctaaaacgaataaagagggtcaggtcaaagggcgcatcatgagccgcgagggaagactaacaaggacctcttcatcgttttaccactgattgcccccccccccctttataaacaacatggcctccaggcctgaggcgggaatccttgccttcatcgagcgcagaattgcgccatccgacgaagttagtactatcagaaatcgctgcatgacggcgatgaaattaagaagcaggatgatagcaagatcgagataatgcgtcacatcttgtcttcaacccgtggcttttatacgtgaagtacagatacctttagacttatgggcgcatctgagtggaagctgcagaccggtacaatattagtgcagtcgctggcttcatgcacttcattgttttagaactacgagataccacgtacccaaacatccccaacggcatcacagtacaatccaacgccagcgaggccccgtactccgacggcatcgcgatggagtcattctgcttctttatcatacgctctttggcaacacttcgctttgcatgattgtattgccgagatgaaatgcaccaccaaaacttgacggtagtgtggtttgtgctgtacaacgagaacgtcctttcagctacatatgtgggccctttgtcctttggcgtggcaatatagtgaggggtgtaatggaacaggtgcacatttactccctgcagcggtgcggagacagcgagttaaattggtactttagacctccaatttgctcccagcggtggagatgctcttagaaagtgccatttccgagccaaatcgggcacgacttgagcaattcgcattcaaggctactatgatttaacgcgaagtacaaacactgagtagtgcactaaataggagggcaaactggatgcaaagcacaatactgtacatgtacgagcacgacagcattctcgtatcctcttgcaatcggagcacccctgaaggcaccgaataaacttagttatgggatacaactagttaagggaagtacaggacaatctggccaatcagaactcgcaaaactaggcgcctttttacagcccttcctcgtgttatatttgatttttgtttgtatcaacaatttatgcactttttcgcagcatctctccgctgcagatcaggtgtaaaccatttcccaggcagactggttggtttcccaaccaaagtggttcaaatcatttttcaagaaaaacctcatatcacttttcccaggtattttcaagcaaagtggttctgtcgtaaatcgttcccaagcaaagtggtttcacaatcatcgaggatttacagccattttgaagaagtcaaaacgtagcttagaacagccttgtgaatgtatttgaggggtctatcgtgatctacgtgatgtgggcatgctaactaagcttttttgcgtcgaaaaaaaagcaacttttgattcttacagaccaagcccaagacgtggactggtccgttttagctaggcaaaccattttgcttgggaaacaaacagctgtaaaccactttgcttgaaaaatgttccttttcgtcgcagtattatgttgcgcgagaccttcccgcaccactttgcttgaaaaacggtcagtttgcttggaaaaaggtgtagctcatacagatctccccggcaaatctggaatagcgatgtcgaatgtacctcgcagagctagtacagttatgcagacgagatttgcgcttgctaaatgatgggtactgagtttagtgaaaaatggagggaccaggccttctagctgtaagcagcgtgcaagtgcaagttgctaaatagttattatagcaggagtgaaaggctcataatgaactttagataagttattgctgaagcacgatgcaatcatgacggcatacggcatgggcgacagtaccttgccctgaacgatggggcagtacggacattagaactccctaaacgaccgtcccaggcagcggtctacgtgatgcgatgctccgcgaccaagacaaactcttcactacatgtacaagtacgaacacaagaatatcggcgatattcggtgatacagtacagtaatatcgccgactcccctcaacgaccgctgagccgacggtacaagacgaggcgctactttcccattaattgagtaattcagtacattgacacttctgtctagccctttgcaagtttcgcaacctcgcagtttctattggtccgacctttccagatttgccggggcagactgtatcattaactaaggatattcggtagtagaccggttcgcgaatgtaggatcacggaaatttgggactcatctgtcttcaccggatgtatttcccgcgaggcacgcgacgctaaagacatgcaagaacgaagacacgaaaaagacaaccaaacgccacagctgatggctcagaattcatgacatctgacaggcgggtgattgctaaaacacacacacgaacggttgagcgcacattcgacatgtactgtcggacagcaaagtatacttaagtactctgtaaatcaagattttctcaatatatcttgcagcctcaaataaataatggtccctaataagcctccaagctccagggaccgacctcatcctcttgtgcttttcacggtgtactgtactgttcatgtttcctcgtgtgggttcgttcacctgattgattttgccattctcgcgaaaaaagctgacaggatggtccctaccgtagggcctacagacaacgacttacaaagccggcagactcataaagccggcattagtagaaaaagacagacatatgttcacataaatttttgttttagcaaatcaaaacgcagaactgtgcttttattttagcaaatcatagcttagataaaatcggttggccactgtaaaacgcgccacctcacccactaaagcctaggttcattgtcgaaatggcgccgaaacaacagcgctatagtatcaaggagaagcgtgaaggcgcgcagctcgcaattcaagtcggcgtcgacgaggctgcgcaccagctcgggcgaccccgcggaactttgttcggatggtggaagcaagccgacaggcttttcgctttccgcggaaactcgcgttcgccaactctgaaggggcagggacgcaaggaaatatttcctagcgtcccagcccttgttgcatttatgaaggacacgcgcagagacgaaaaggtcggtttaccattctagtacgtgcttttgcgacttaatactgactattgtgcgtgcttttatttttgtaggctctatcgacgcatgcaatgatcgactacatgtggctactagagcctgagtggtgtgcaagctacatggacagccacaaaagccctgagcagtcgctagaaaaaatgtgtcaacgcatttgcaaacggtaaattgtttttcatgatgtgaagttaaattttaattgattaatcattctttcaattgatgttttttatttagttacgacttcacgtctcaaaaaccccaagaagccaagcttccgacagtggagctgctcgagaaacgcgctgagttctccattgaactttggaacaagtactcgacgtggtgccctacgacactctttaacgtggatgaaacggctatcaattttgatatgccgccgacacgtttttgggctgtcaaaggccgcaaggaccctgcccgaattaccaagatgacgaagcacactggccgaatgacagcagttcttactgttcgcggtgatggtacgttttttcttgctttaacaattctgaaactgggtattttatgctaacacattttgtattatatattttagggcataagctgccaattctcttcatcatccggggtaagctcggcggcgacaccgacagcgacgagctgccacactatccacccgatcactactacactgtccaggagcatgcctggatggacgcggtaggatggaaatgttatgtgagtaatgcgttaaaacatgaaattgatggacccgctgtcctcctccttgataattttgactcacatgtttcggaggagggacagcgggtcgttttcgaagaaaagaacgctgcagtggtgcctttcccgcctaatacgacggcggtttgtcaaccgctcgaccttggcgtgatcggcccactgaaagcaaaaattaggtcaaagtttcggggtgttgcaggagacactgcaaaggagaagcgcctccgtgcaattaagtctacaattgcggcctgggaaaaaatagcggaaaccaccgtaattcgtagctttgagaaagcaattcctaagtatcctgagatgttgatctaataatagcatctttgttttcaaaacacatggatattttctgggttttgtacaactgatttttttttcgtccaaccaaaactctgccgggttttaatgtcagcgtaagcttaatatagggctttgtaagtcgttgtctgtacatgtacgaggtaccgccgcagggtccagggatcttcacatagggattggcacgatttgcaacgcaaaattgccacatgtactgtacgaactcgtcgacggcgatactggtacagtaccagtggtacttactgtacatgggagcaaatgcttggaatgaagtgcattcgacgatacaatacactaagtacaggaacttcgatcaggtccactgctgctggtccagggacgtctggaaggtggaaatgacctcgttgttgccgactgagccttgcatactgttaatggccttggtgtagttgaagaagatctacccttgatcttgcggtagacgggacaattcgaggttcaagtagccaaggtctccgctctctttctttgacactaccaatagtaaataataatctccagaacccgcacgaagatataccaagctagctttcgctacacgagttgtgtgggatgtgtgggattatcaaaaagactcatcgagtttcgctgagggtgacaccaataacgtagcatttattgtgcctttcacgtgttttggcggtgagctgttaattcaggtggaattagagtcataaaagggcgatcaacgcttatttagtgtcgataagagcaatcccacccgtttgaacaaaaaaccaaaactaaaagcgaacttagcttaggttcatgaaagtattagttatcaagtcgaacaaaaccaaaacaaaacctcaacaaaactaaatttgctacacacacaaaaaccaatataaatgaagcgtcgttactatcctgcagctatcccgcagatagggcctgatagtagcggtagttctcctgaactactaccagtagtattccagtaaaaggaaacgaattactagttactgggtccttttgctcaagcgttcctagctactatagtaatagtactatagtactatcaaactactggctgtatgtggtccacacaattatttttaagtatatttttcggcaggttgtcacgaaatggtcaaattgtttaaatattttatattatttaagggtgtgactttgacatgtgagaacatctggtcgcaacggacgtgcgttgtaagtagtagatacaaaatctcgcgatgtaccaacgacaaacgacaccaaaatatgtagacccagtacttcttaccgccgtcgaacgagcacaagggcttacgacattttttcttcttatgctgagcagcaacttgcgtaccagcggcggtgctaaactattgcaatcaacactcaccatttactcaccgcgattaaacccaagtggagctttgggctttgggatagactcagcaggcgaggggttcgcgagcgaacgtatgtgtcatttcaagttgtgaacctcaggtgaacctcagcagtaactcgatagtattattggggtcgtggatgagttactggttactatagtgatagtacaatcagaaagtgccaagttactggttactatagtagaagtaatagtaccatattctactggactcgcgaattactaccaagccctgcccgcagctatatttgaccgtgctttagctccagatggacgttttctaacacttctaaagggccaccctccttaactttattggctcgcccagtctgcagatttgactctagttttattcaaaggggtgggattgctctaagggattagagttatgccagaattatcacggcagaatagtgaaaggcaatacagtaatcagacatttacgtctagcgaattaccactagcgatactctctggtgtgcaccgtatcacacttcgcaccaggtggtctctttcaaatctaaagcaccggcacgtggcatggaaaacacatcattccctttgggctgtcgctcatccagttttttgctattcgaagcctaggaccactcactccacgtctcctcatttcccaactcgccttcgagctcccaggccgtctaccacaccatgtcaagtccggctatgcgtctcacttacgtcctgctactggctgcggctacccttctcgccaacaccaacgcgctggcgactgaaggcgacgctgaaaagcggctcctccgctcccacaagaaccacaagaaggctgcgagcgccgccgttgctgaagaagaacgtggtatgtttgatttcctcaagaatgtggacgacttgcccatgttcgagaggatgaagctccagccatcatacaagaaccacatcttcgaatcatggagaacgggcggaggcaccaaggaaggggccaggaccttcatggcaagccaaggtctttcgccgaaccagattgacgagtggttggagctgtggttgcagcattttgcggcccacagaaaggcgaacattaaatagaatgttttggatgcgtttttgatagcttgcttgtggtgcattacgtttcctacggttcgccgcgcttcacatgagcaataccattatgccaccacgcttagaagcatcatctaagttcatcaagttcatgacttagattgcagcctacaaatcgtggttttgaaggactcggctataccaacaaacactgtaggcaatgctgaaacgaaaccaggaacatctacagtacatcaaagcatgagtagtagtaagaaaaaatatttagcctccaacccaacgactagcatacgcacagggcattgcctcagtcagcacccacttgccgcaggtacaagacacaacgctaggatctgaagttaagcccacacgtgacatctgctcaagaatttgtctcgtactgggggtgtagcgagagcaaaatacccggagagcgcccgcttgtgaattacagcggtgaacaaacgcgatcgactcgcgctaatgggtgaaacacatatcgtggaggctttgacgccagattcagacttgccgaagtacttcgatatattgatttaatgccgttgttatttttcgactgcggccagcgacaaatgtgcagcgcttgaatgcaagcacctattttcgagtagtcgacctcatgcagaaaaatagttttgctaacagttcatctcgacggttccccatggattctagtaagtcgatccaaagtcacccgagcggatgttcatgaacttgactccagcattcggattttcggcaaaaaccgtctccgggtcgccaccaggaaacgggcaattgccacgcaacccgccaggcagcgtcggatcgtccccagggaagtggctgtccagccagctcatgttaaggccgtagtcgacccagacactcatagccagcgtcatgccgccaaccatatcttgtccaagcttcgcgagcccgctcgtgaaatacgcggggtcgtcaaaatacgtcttggacgtgttgcacatcacgtcggtgatggagtcggtcccattcaaggcggaccatgagctgctggggttttccaacacgcgtccgtcctgcttgtagagtcgacggatctccaccagttcaccactgtcggtgttgtcggcggtcacgaactgcgtcacgaccgtaaagggacgagtcgtgtcgatgtcaaagtccttgccacgaccgtagaactctcggtgacccatgcggaagggattgaagtcacagccgttcttatcgcaccagccagtgtaacgggtctcgtccgtgcttccgcagtcctcgaccgaggtgcacttctgctggccactcgtagaacacgcgtgactcgtgtaggccgtggccacactgttagcctcccagatatccatctcggcacagcaagaaccgtacgcgccgtccatattggcctcgccatcaaggaaatggacgtcttggcgacattgagcgtcacaggcgccagtaccatacgcagcgccagcagtattagctgggaagcacgcagtgccgccatcggcatccatctgtacgaagtagagcgctccgttggagccacacggcagattcgacacgtccacgtcgaagccgtcgaagctgaactcctggttcagcagttggaactgcttgtacttggtcctagacgcgtccagcatgtacactcgtgtgccgaccccgcttggtgtttcgagcttcagactgagcgtttgaccggctgtggtgatgctgaagttaccggcatagtcggcaccttcaagtccacaggtctcagcgcactcttgtggagtccagcacgtcgtcgagttccacttggcgtcagcgacgcacgggttcgccgtacccaccgcgttcacgtcgcgccaattcgcatcgattactacggacgattgctccgtcgtacacgaggcaactttcgcgttcgacttgccgacttgctgcgcgatgtcaatagttgttgtgcaccggggacgggtgaacctcagccacttgagtaccagcctgttgggccatcgaaagaagtgggtaggcggatgcagcggcgataacgactccgatcgtcgtggaaagcttcatggtctggtcgagaaacgtgtcgatgggataaacggaagcagctgaagcttgtgctggagacggaagattgaagaatgaagtgcggcgtccttgcgtagttctttctggtataatacgccaaggagtgggtggcttatcgtcgattgaaagcttcggaaaaaatgtgctcgtacgttacttaccttgcgccagtggtttggcttaggttagtagatttcacgtacctattagtctgcatcgaaatgccttcaaggcattgccttggcttctgtagaggtacggagtgatccctacctgtaaagtctcacaactaacgttaaaatgcgcatatcgtcctagtatatagccggcgtcatgtgcgaaaaagaataagtatgcgcgcggtgatctctagtagtctggtttcccaggctctgtagtaactggacaactttttattctttttcgtacagtaccgtaatcgtgactagaccgtttacaagatcgtggatagccctgatgcaagcgctgctgacgtgaaaagtaagcaaagtgagcgtgaatcagttcagtactctgtcactataccttatggatcatcgttaagttctcatcgagctgcttcgttgctgggctaacgcggcgtcgcttactgaactggtccgaaaactcaatcatttagtagtaatggggtccgcagccaatggaactatattccgggtttgccagacaatggtgatatgctgctaatgtttgctaccgcttgaagtagaagaaacttcacaactgtattatcgttagttcgttcgtttttgataggaaaaactgtttatacggtggtgtttcttatgcttattgtttctctggttgatgctgcattatccttatccccaacaatcgattccaaatgcaaggttttccagaaagtaaaagtattcctgtacgtatcgcgaatgtgtccgtgtgacgaatataggttagggggtgttattgcaaacaacaacactcgtctgactcaggcttgagtgcgtgccaacatgttcgtgaagatcataagaggagctcgacaatttcttggctctgctgtggacacatgggaacttgctcaagccgagctgcatggccgtatgagtcgagatcgaatacagaagctacaatcgtttctaggaaagacaagttctgccagggcggtgggcgtctgcattctgctgcctcacccgtgtgtactcatggtagcagcgctagagattatccctctatcaccaccgaaagcgggcactcgagccaacggttatctatttatcggttcggatacgggtcagacctcgggcatttcaggagggatgacgtatcttgggtaggacactagcgcgttggctctcgtctgcggacttcgacacgggggggggccgcccctctctcgcttcgctcggggagcgccgttgtgcggcctgccccacccccttagtcgaagtcctcgactcggccaggcgctgtgtctagaaaaaaaatatcgggttgcagcgctcgcattcgctcgctcgcgcagacacgcccccgcttgatcggcgggagttggcaatgcatgaatgcacttggtgtgtctcgcgctcgcgctgctcgccctcgcccgtgatgtcgcacacccttgccaactagcagctggaagtgaccaggaaacgtctttatagttgtattgaaaaacctgaccgaaaattcaggcccgacctgtatccgatccagtaaataatctactgagccaactacaggttttggcttcgatacttatccagcattattgtgatcgtacctggcatcctgtcgacatttcaatcattagtacctgaactgggccttacaagaacgacgacagtgacgttgagtctaacggggtcggtcgcatctacaggggtggctattgcagcgtcactactgattggtttcctggttcctttcacgctgcccgtcagtgcccccgggtggttgttgattgtcactccacccacgatcatattctacaagaccagactccagagctcgtgcggaggttcatccgctgctgctccagcacagggtgcctcattacgtctaccatgctctaccccatcgcattccgtcggctcgattccgttgggcaaattttctacgtcggtctggttcctgtcatcaagattatcggccgaaatgtcatcagcgggctcatcggtgaccgctacgatatgaaggcggagacggtgattttccacgtcgaggtcttcagcgtcctctgcatgtctgtggcgctgcacgactcggcaaagttgacgacaacgctagcggtgatggcggtggatgtcgtccagtcgaaagtgacgctcaatgatattgacaaaatgatgaaccgtactaacatcgttttactggcgaatggacatgggcgttttgagagctttcgccagttggttttcgatgaggaagtctctattttgaataccggtgcacaacatcaaacgtgcggtacacacaacgagactgctccgcatcgattgaaatcatcttttcaggctccgaatgtgcttcctgggtctaccgtatccagcagcaacaagatttccgcacaaattcatccaattaccggccctcccgaagagcaaactcaactagccgtcgcaaaagaagacaagataaataccacgatgaaagtagcacaaatcctcttcacggcggaattcgtgcttctcgtcaagtacgtcgaagcaatggtgccaacagtctatggtgcgtttgctgtgcttacgacgcgaattacaacagtggacgcctgccaaaggtatatcaaaccgtcgacatatctgcagcagatatgcggagtatatgccggtcatagatcccgcgaggcccagatttcgtgtcgatagacagccctacccgtatgaatatgtcgtgtagccatcttaaagatttaacttgttatttgtatactttaagtcgaccatcactctaccgtcattcgggcgacataccgcctcgcttatatcttcctgccgccaacttgaagttgcgctcacttttgaaatagcctccgaaggcgcgaagacagcaaacgatctccggtacgtgagctgcaattgcagtaagtgctactagctgttggctaacaccgtgtgttacagcaggaacgatggtgcatctgacgcactccgcggtccactggaagctccgatgcatcgtcgactcctcctcctcctccagcgacgagaacacgccgccgaatgtcagcagcgcccttgccatgggtactgacggcggctccagtgcgacgggcacggcgacgccgccctggctcactccagagcggaccaagcaccgatccaagcgcgtgacgaacccgccggcaacgccagagaccccgacggccccgctgccaacttcgggggcgcgcacaagcccgacgacgtcctcgcccgtgctcctggaaacgcctccaagatcgctgccgcgcgctacgacaagcacggcgcttcaccctcgccaagggcgtcaagcacgccaagccgctgtcgccccgtactcacgccagcgcttggggccccgccatgcgccgcgcagccagcgcacagagccccgtcatgtgccgcgcagtcagcgcttggagacccagcgcacggttcccagccatgcgtcacgcagccagcgctcggagaccaagcgcacggacgacattcgacgagcgacacggacagtaccggcggctgcgccccgtgctcaactgcaggcgtcacggccgggggacgtgttcgcgccggcacggtggccgtacgccattgctcacttgcgcgtgcaatacaacccgttggccaccgtcttcccagcggtccagccattcggcttttgcggttgctggaatccctgccggaccgacagctgccgcaacgccctcgtcaacgtgtactgcaatgcccgtacgggggcaagtgcggcaacggcttggaggagtcaagcaagatcttcctcggccgcaacttccgcacccagcagctcggggttgtcgctgccgaggacatcagcgccggtgaggtgctcggccagtacctaggcgagatcgagcacgtcagcgtatctcgagccaaccgcccacgcaacaacggctaccgtctcctgatgaaacagcggcccgagaagccgacgtacccgatctacgctgcgattaatgatgaagggatgggagggctgatgcgcttcctgaatcactcgtgcgagcctgcagcggagttcagggaggtgtcgaacgggcatcgaacgacggtggtcgcggcgacgacgcggcgcatctaccgtggcgaggaggtgaccatcgacttcggtgacgacctctggttcgtctgccgttgcgagcgagacggctgtcgccaccgcaacacccaagacgaagaagacccgtgagatgacagcagcgtagcaaggttgctaaggagcgcggagcatcgagtgaagcaacatgcatgtatgagtgaatggacgactgaatgcaggaaggtgtttgaaaatcgagtgtattgtggggacgaagtgctgctagactacgtggatgctccgaccactgtgagtatgatttggcgcgaagacggcttcgttcgaaagatctcgagccggcttcctgctgctgcgtttggcactttgggcgcgaagctttcgcgcgctccaggttgaagctgctaagagcagcatccttttcaaattggtggcggtcggcggcatgtactggtcgagttgccgccgcttctcggcgcactcgtttctctcacttttgcttttgccaagcaacgagcaccctcctccaagacgcatacccgccccgccccaagcttcaattccgcgcgcttccagccctggtacgctgccccacgcgagattcgttgatgtcaagcttgctgatggggttgttcaacttgttgtgcatgtagatggtccgacaaaccggaaaccccaactacaccacggcggacgtcaaccacctcttgctgctgatcgagaacgagcttccgctcggacgagacgagtaggagcgtctagcggcgtcgtacaacgccaacagacctcgcggtgcccctgagcgagtctttgaaagcctccgccgcaaattcaaagtgctctacagcaccaggaagccgactggcacgcccaacatgccgccgcacgtcaaaaaggccaaggaggtgaagctggcgatcgacgaaaaggccaacatcatcgagatggatgacgaggccgacgaagatcgccccatcgagcccgacttctgcttcgaagcggaccccgacgagagcctctacggcgacgacgacgccgatggggaaggcgtgcagacggccggccggcccagcactgaagggtcgacgtgcaccgacgagtccgtcgggctcgacttcgccgagtccgaatcgcctagtctgggcgagtttcaagagctgcttgcggcgccactcacgagtggtgggtccggtgacggtgcgcgtactccacgaccggcgcctcctccggcaacgtctaccacgcgccgtgaggcaagcgggccgccgaaaccacgtcgaacggctgtcagctccgttgctgccaatgcgagcccaccggcggctccgcagcagacaccgctcgctgctgctcgcagtcaagaagcagagaagtacccaaagctcgtgaacgtttcgaaccgcttgggcgggcaggacctgacagcgttccgtgacaccgtcggtgccaagcgcgcgctcgaagaagacaaggagaccatggaggcaagctttgcaaaagcgaagcggattcgcgccttgaggacgtccactgccctcaagccaaagcttgccagcctcgaagccgctgcgaacaacacgggcgaagcctgctcgaggcgattctccttctccgtgaggagaacgaacgcaaggccgaagaacgccgcgctgaagaggacaagcgtcgccgcgccgaagtcgctactcaagaggctcgctaccttgccgacaaggccgaagcccaggaacgccgtcgtcaagaaaaactcgaaagagaggaccgagctcgtcgcgaccgtgaggatgcgcgcactcgcacgcaggagctgatcatgctgatcaatgccattaagaagagcgcgtaagcaaagatggagacgaaggaaggagttgttggccctgcacctcgcagcatggcgcattcatattgtagtagcgttgcatttatctcaaagccgttgaatcaacaatttgtcatgtacagcatctccatcttcattcaagtcgtgctcgctgctaaactgcatcgatctctaacttgcgataagcaccatcttccacgttatcatcagcaagtcctacaacaacttgacatcatctgttcagcattagtgtcggataaggaagctttctcccaacttggcattccttgcgcttctctgtcattgcatctatccaatcaggacaagttcttcaatgaatttagccaatcacgatcgattcgtgtgtatcccaacattttcccaattattttgggaatttacagtcttgctagaataatatccaatacaaaagtttagtgtaattgttgcattactcatatttgaccgcaaattcccaatacaaatcatgattgtatcgttggtggctgtgactcgtctgctttctctcctctcccatttgaaaagatgcagcgagcgccgagagggcttgacatcccgcaagggacagcagggcaggaggcagcggcgatgaagtgcttcagcgaattcttagctcttgctaacatgaatgaggagtcaattgctagtattgcgaagtcgctgtctattcctgatgctctaccaagtcaaaacttttactctttgctaaccgccttctccattttcttgcaaactaagccaagtgctcgaggaggccgtcttgctaaggctactgctgtgggctatatgtcccaagttgtgaacctgctccgagagcggtaccctctgtacttgtcagacagcaagcgaattgcgaaaatacgcgacaaaatgggttcaactattgaggagcgaaatttgctagctggcgtgcagactggtgaagctccaggctgcacgctcggcgacttgcgtgttctggtgcaggaaactgcgattaagggggttggctcaggttataagagcttacatgacgctgctgtactaacgttaatgtggcacacgtttggtcgagcgatcgatacctgttttgctaggaagagccagctatctatggcggcatcgggggagctctttctgcatctagctcgaatcaagacttcggtggttcaaggcatctcaatttacaaggccgcgactcactgggagcagtgtatgctgcacggcctcggaatgctgttcgtcggagcgtcggagccttccagctatgtgttcccgctagtgccgcacgcggcggcatcggatttgccaggggagaagacctacagccaagacgaagctatactctactgggagaaccttgaagagaaagctgaaccaaggaacgagccaccaacaaagcgcgtgagaggaaggcccaacgtgtccaagtatattaacgacgtcatcaccatggtctgcgagcgccaagcccaggcctctgccccgctgcccccgacgctcaccgcagggctgagcagccactccttgcgccgcggctccgcagcgtatgcaaacgcctcaccgcagcttgcgatccagtggatctcgacccggggagcttggctgctagactcgctcacgaaggcgttcgcgtacgtgggtaccacgacacgcgaggaccagagtgtcggcaaagtcctcgctggataccgagacccgcacctgccatgcgtcacgcccacgattgccaccttgagcgagcttcttcctgcgctcgagtacgcccagctgctaaccctgcgcggccagctcttcaagaacgtcagcggcttcacggacaccacgctcaacgttgacgccttagtcctggatgcggcgctcgcgtccctgctcatccatcttgacgacgtcgcgacggcagtccagcaggagcaggctgccacaggcttcacatcgcattacctgtaccgcttccacgaagctctggacgcaaccaacgtagcgctgggagctcggctctcgctggacacgtgcattggttggggtcagcagcttcgcacggcttggcaaacggagaacttcggacagctgggtgaacgcagcaatggaaacaccaccatacttgccgcagccgtcacccagatgctatcgtccatcgcagcaatgcagcgcacacttcagaagctcgtcgcggcccacgagagcaaggccaccagcgctgacggtcctgctccttgtcgctgtgctggccaggccccgcaggcgagcactgacaccgtcgttgaagcgcactctcttgctggctgcttctacaactggtacacacaggagctgtggcacacggcaacccaaaagaaacaacagtttgttcgcgctgacctcaaggcaggcgtcaacatcatgatcatagcagcagggcgagaggtagacgtaccaacggcgccactggaccgggacggcgtcgcgtatcggctgtggaagcagcgtgtctggacgctagcggaagacttggacaagaaggtcaacgctgcgcttgggagtatcgacggtaaaggccgatccaaaaccgcggggtcgctacggaagcgctggagaaagctgcgcgctgaccaccgctctgcatacgacgcgctctgctcagcatttatcacccgcaaagcgaacggtggcatcgtcggccgctgcacaccagctagtcaccaatggaagcaaaaagacttggagtcgtaggatcacgcagcttgtattaactcttaatacattcctattcatacaacatggataatcgaattcaaggcgcaaatgcacacgtcattgccatcccacaacttaagcacagcgcatggattcccgtcagtcccgatacaaagtcatacacaatagaaaaacgctcacataccgtcagcgagcgcgcacgacctcgtgcttggccgacagctaccaaaaccggcagcataacacccgccctgccgggttttgtagctgctttcgacgggtccttgcgtggggcgcctggggcgcgcctgggggcactcgggtctggggtggtcggcgggggaggcgtgcggcacgctcggagcgcgctgtcgtgttggagatgcggggcggaaagtgtgaaggcggagaaggctgcgcagccggccaaaaataaaaccttaaggttttttcttggcattggagccgataaaccagtccatactttgttgaagtcatttggaatctcacttatgattggctctcctcattgggagcggcgtttgggacctggtcgattaatgtacttgcaaggacttcgagaaattctacgccacgcaaaatatattgttgccacgctacttgctatgaatcgctcactacttaggcaacctgagtcggcacctccatctcgccagcaaacgtggttcggatctgcgagatccccaccgttcggaccctgtagttggccatgcgaaacaagttgtccaggcgaagtcctcggagcttggggtcgtacggcagtggcaggttgagtctcgagtagaccttctgcacgcttcccatgccccactcggccgcctggcggacagaggtgatggcattgtgaagggtgcgcgccgatgccctcagcgacggcaggatccgctcgaggtctccgtccttgaggggtgtgagaatgcgccccgccatcgaacaggggaaagcggagtcggagacgacgttcatcctcgaatccgggcaaaaggctggatcgagtagcttcaacctaaagccgagcgacgtgtccgagtcattccatgaacccggacagttgtggcgactccagataatgcagccgtcggccgcaaagcagatagttcctgtaacgaaaacagaatgtagccatccattgtacatagcattttgaagatctgcgttggaaggttgttgcacctgcagcatatagccaacaaaatgggttaggacggataggatcgaatgaatacaactgcatacatactttgaagttcttgccatcgatgaaaccaaaagtgtacttgagcaggggctcgcgtgcctcgacgagctttgccagctcggcttggcgcgttggtgatggccacgaaatgcgcgccggagcatacccatggagcgccttggacagctcctcctctgcacgacacaggattcgcgagagcgtgctcgggggcaagcaaaagagcatggacagcgagctgtgctccatcgatctgacgtagaacgagagcaccagtcccaggacttgatggtggtaccgtagcttgggcgggcggccgcgcaacttggccttggggatgaagtagaagcgcgaaaaccttcgcagcaagtgctcgaaagcagatctgcagcacacagtcacacgttagctacatacagctttgtatcatttaattcgatcaataaatgtacctggtgagactcgtcgcgtttataaagttgatatcgctcccaaatcggtagaggagcatccaggccgagttgcatggtgcctcgaggcactgtgccgtcaggtagtggcgacttcgcatggctgtccgccacgcctcttccagcagcaagcggtacacctcgcgccgcgcctcgaccagctcccgcccctgcttgaggaaggcgtccgtcacgacgaggagggcgtccgtgtccgcgctcgctatcgtcgctgagcttgcttgcgctcgacgcgcgcgaatccgaaagtgacggaatctagaagaagtgcggcagcagtgctgccgcttcagtgtccggggcaaattgacaggttcacatcgaagtgactgcatatgctatagtgtagccacctgattcagggcagtaggaaccggacgtagacagaagcaataagacacttttggtgaagctttcaggcgatatgccgacatatatcttttttaagccgggcatatctgctgcagatatgtcgaccgtttactatacttttggcaggcatccagtgactgacttgttttgctggtcaaaaagtacatatatgtagcggcttttgcggcaatcgcgtacagtacggccaatcggcagtactacagtcaattcgatgcggtcacctccggcaacctcaacaacaccattctcaacgttaccgtctattgtctgctcaagaccctctcgttctgcatcatgtgttatttgcttagccgccgactggaattatcctcgattcggcttgtggcgttcaccctcgtggaccagtttgaagcagtctttagcaaatttttgctgtggagcgattatacgacgatcacgtcgatcagacactcaggtaagctcgactacgagttgagactatatcgtccgtggtgatgtctaattgatcgactcaaaatgttttaggtcccgatttcacatttaaatttgcgtggctgcaccaaaaggcaacggaatgagaaactcgagtatccgggcgataggataatgcataatgcaactcaaattgctcacgtgttcaagatttcactacataaggctactattgtgccgcaatgctagacttcaggcctatcactccactatacgcttaagcgagctgagcacgcccgtccacagcaacgtgaggggtcttgtttgccataccgatctcgaggtggttccaggctgggctcggagtcttgtacataagaaaatcataagcccgcatgcacatttcaacacctcgtattaaacgtgtctgttttcttgaaaaagcgtacttaagtacgagcccgcacgagtatccactgcgccagtcatacagataacagcatctatccgtcgatagtaaacttaaccttttgtctccaggggtaggagagtgagtctcccgcgcgtacgggtaggctcgactttgaaaataaagtttgagcgccacagaattggacgaatataaagaagaaggactggagagtcctaagtttatttcttggttcaattcgagaaacgcatcgtgttgaaaatcagtcgtaagttgagcaaatcgataaaaatcgccaaagttttgtattgagcgacacaagaggtgctacggataaaccggttagtagggtagaaagaaaatgccttggggagctagaaacattttgcaggtactcaaggtgagctcggattgcatcaaaaacggcgagccaagttttcatcaaaatatctaagaaggaattcgtgctcctcgtcaagtacgttgaagcaatgataccggcggtaggatactccactgcagtatcgactgacttgtatgctatttagacattacagcagcgttcgtggcaattgcgcagagcaccagtactacagtcagttcgatgcgatcacctccagcaacctcaacaacaccattctcaacgtcatggccttctgcctgctcaagaccctctcgttctgcgtcatgagccgtctgcttagccgccgactggtaatatcctcgatccacctcgttgccttcgtcctcgtggacccgtttgaagcagtcttcagcaagattctgatgtgggttgtgtgcacgacgatcacgtcgatcagacactcaggtaagcttaactaccttcgctcgtggtggcttctctctctctctctctctctctctctctctctctctctctctctctctctctctctctctctttctattcgatctttcgtggttgttgcaggtctcgatttcacgtttaaattcgtctggctgcaccgagtgacaacggcatgacttcactggagtcacgcggcgacaaatgcacattttccaggcgataggataatgcaatttttcacggtttcacttcataaggttatttgacttgccgcaacgctggacttcagactcaacactcacgcgagctgagcacgctcgtgggcggcgtcgtagtcgacgaacggaccctctgcggcaacgtgaggggccttgttcaccatgccgatcttgaggtggttccagttcaccgtgctcttgaggcccggcgtctggtacaagtcgcgcaggtactgcaacaaacaaacaacaacacaataaagcacatcagctacaacgtccgcatcagcaaaaaataatctttcatgcaagaactcaccgcaacgacgttcgggtactcggtcaggtgcttgtcgctcttctgctggtacacgtccagtcggatgagcgtgtggaagagacgcacgtccgcctcggtcacgcccttgcccaccaggtagcgctgcttggccaggatggtgtccagcatgtccagcgcctcgtaggccttggcctccgcctgcgccgcgtcctcgggcgagcgggcgaacatcttcttaaagaagcccatggagacttccgacacaatcccgtcgttagcagcgtcgatctcagcatgcagctcctccgggtacaagtgaacgttggtcggcaccagctcacgaaagcccgagtcaagcgtgcggagaatgcccgcggactcctccgacacgatggtctgcgtcttcgagtcccacagcaccggcaccgagaacgtgcgcggcgcaggatccaccttctcgtacaggtcgcgcacgaactggacgccgttcaccgtgtcggggatgcagtcgtccgtggggtacgcctggccgttgacgcccgtgaaggtggaggacttctcggggtccacgaaggtccagcccttgtgctcgtcgttggggtcgttcggcttggtcttctggaagacggggtgcgccacggacaggccgatggcgtcctccagccccagcaggttgcgagccgccagagcgcggcaggcgaacgggcacgagtaggtgacgtagaggtggtagcggcccttctcagcggggaacttggcgtcggcgttgggctcgatctggaagtcgtacggggtgggcttggtggtggccatggtggagaggaggcggtgggggaagcgacgtgagctcttgggcgacagttgctgaatgacacgcgtgagcatgtttgacaagtgtgtgggtacgtttgattgcgtaggcaggattgcgtagggttgccttgatttcaaccaatcataacgctggaaatgtgttcgtcccgaggagtgatggtcaattgtttaacttcaagttaagtgcgtgcaagtacaaagcacccatgcgaggcgttcctgcaccaacgctgtccgggagctaccgttcattttcgggcccttccagcccttgtaatgcgctcggtaactggtcccagcaccaaaactacttgtcctttggctgacaccgcatcagcagttgagtatcttacctccaacgcagtaaatttggtctttccggctcatagttttccgtttgtttcatagtgtgttgctgcgcgtaactcatattacatgtacagccgtgctctcatgagtgccctcatgctaacaatcctaccggatgatcgctttaacgcgttcggtgattgcagacgccaagacaaggggtccgatgacgcccgatcgatcttgccccctcttaccgcttgagacttgccaagacgctacagccctcgaagctcattctccaatttgcctccaagtgcaacagactcaaccaccaccgccttctctccaccatggccgcatccaagcctgctccctacgacttgaagatcgagcccaacgccgacgccaagttcccggccgagaagggccgctaccacctctacgtggcgtactcgtgcccctttgctagtcgttcgctggcggctcgtaacttgctggggctcgaggacgtcatcggcctgtcggtggcgcaccctgtgccccagaagaccaaaccagacgacgaaaatgattcgcactccggttgggcattcatcgacccagcgaagacccccacggtaaccggcaagaacggcaaggagttctccaccgccgactgcatccccgacacagtgaacggtgccaagttcgctcgcgacctgtacgagaaggtggaccccacgtcgcgcacgttctcggtgccgattctgtgggacaagaagacgcagaccatcgtgtcggaggaatctgcgggcattctccgcacgcttgactctggtttccgggacctggtgccgtcgaatttcaacttgtacccggaggagctgcgcactgagatcgatgctgctaacgatggcgtcgtgacggagattacaatgggtttcttcaagaagctcttcgctcgcactcccgaggacgctgcagcgtctgaggctaaggtctttgaggggcttgccaagttgaacgagctgctggccacgaagcgctacctggttggcagcagcgtgacggaggccgatgtgcgcctgttccacacgctgatccgcctcgacgtgttccagaagaaggcgaatgagaagcaactcgcagactttctgaacgtcgtgggggtaagttgttggggatgttggagaatggtacatgtacttgttcggcattgaatactaacgttttgttgttgttgttgttgtggtacagtacttgcgcgacctgtaccagattcccggactcaagagcacggtgaactggaaccacctcaagatcagcgctgagaacacccagcctggtgttgccgtggagggcccgcttgtcgactacgaagccgcccacgaacgtgctctgcttgcgtaaatgtccaggctgtaatagtagatgaataagctgctgttttacaataagcacgtgcaacttataagtttttgtccccaaactactcaccctcgcctcttcgactgtaagtactggattcccaaccacagcacaacttgtacgaaggcatcctcgattgaaaaaaatcagtcaatgcgcgtcaaatcagtacaaaaggagcacatgcttgccgtttgtcagcgggccatgtacgctgttgatgtacttcatgtgcggactgttttttcgttcgtcttcattgctcgttccgcagatgtggatgtcgatgctccaaaacaagaggttgtatagcttcccaacgtgttgtgctcatcctgttggattttgatcgaaccagttgaattggaaagtgaaatcggggcctagtaggcgtttacaaaaaattagaacgtagtttcttgtcgactggagatgacacgtacccaaatgttgaagcgaggtttgagttgtgtagacgacccacgttagaattttgctatagacggcctcccattggtatagcagcccaaacgctacgaggtggatagcagatattcctactcttcgactgataaggtggcacatgatccagaaggagagagtcttcagcagacagtatgttaaaacgttgagaatagtgttgctcaggttgctaggggtgatcgagccgaattggctgtaatactgtcgatttgacgcgaagcccgctagcgatttatatcgtcagtacccgcatctctctcgtgcactgccaaagaaagatcttaactcaccgtaaatcgctggtacaatggcttcaacatacttgtcaagaagaacgaattctgctgtaaagaggactcgagctgcttttgtagcgagtttttttcttgtccttttttgacaaaacttgggcagcatttccagtagttcgtttcattttggcgtcactttccattcgagcttgctccaaggagcctgaagtcggatgaatccgagccacgctcttatacgtaggcagcttgtcggttgaggccagtgaggacccagcaggaatgtttggaatcacagaagacagcttcaagttacttgaggcgttgttgtgtgctatacaaggctgctgtggtgttgttgttccgccttcctggtcaaacaccaactggcaaattgattcagagcaccttgatctgttggaaggaaatactcggttgattcccctcatcatcttgtcgatgtcacgtacagccaccaccgactggacgacatccaccgccatgaccgtaagcgtagtggttaatttcgcggagctgtgcagcgcgacgggcacgtagagcgcgttgaagacctccacgttgaaaatcacaatttcggccttcacatcgtagcggtcgccaatgagccagctgaacacgtttcggccggccattttgatgattaggagcagcccaacgtagaaaacctgcccaattgagccaagccgatggaatccattcacgtagatcgggtagagcaccacaggtatcgccagccatccaatgatgaaccaacagcgaataaaccaccacatgagctcggggtagtatcgaagtcgggacttgtagatcacgattgttggcggtatgataacaaacagccacccgggatcactgacgagcagcgtgaaaggtaccgtaaagtcaatgaaaagcgacactatacaggtagggatgggcaaatgaaaaagtggcatttgtgccattaatgcaatttgtgccatttatggcattaatgcatgggttcagccaaaaatgcatgcatttggggggatctaaaaatagctgctgatcaggtgacggcattttggcttcctgctgcacgacgattgatggcgcgtgccgacgaagtggattgatggcgctgtcgatggagatgcttcatgcctcctttttccttattagatggcgcctgcttcggtagaacagcgacgtgcggtgattgaaggagctgccgtagaagcaagtcgttccatggacgcaccgccagggtaattgccccctcacacggtgcacgacagcacgcgtgagcggcgcggcacacccggctctgctgcgaatgatgaagaagtcgcgcctcgaaggcttcctcattctccaattgaagctgcggcagcaaggtcgcctccccccacccgcccaaagctccggaccagacaaagcactactacccactgctcgctcggttagcagtcatgatcttcacgatcccaacgtcatcggcatcgagcgagcgttcatggagcatccatgactttattcatacgaagcggcggaatcggctggatgcaaagcgggtggagacgcttgtcttcatctactgcaatgcatgcaacaaggatgccaagaccagcatcttctaccaactcaacgaagagagtgagagtgaagacgatgatgacgatgatgacacgacgggggacgacagcagcgcgggtttggacgacagcaatgcaagcccaagctacagcaattcatattcgtacgacagtagtgaggaacacaagttcgagagttagcttcaaacaaaaatctatttctgtccgtaataaatgcactgcatcgatgccatcaatgcttttgtgcaatgcattaatgccatcaatgcatccctatatacaggcagatgtcgtatcccaccctattcggggtcgttaaagtacgccgcggctgaaaggagttagaaggagtgcgaggcgtcgaagcagtagaagtagtcgaaagagtagggatgtagattgaatgaaagttttgcttgttcttgaacagggtagatttacgagtgttagctaactatgaaactgacagggtagcttggtcttcgtgagggtgacacccctcctggacagcactgggggtctcttgccgtgtcctccatcctcggacgtgacaacccctctacttcgctatacacaccattgtccacactgcgcaacacccgtcctgggtggtcttctcggcttccgttgaccgcagacacggccgctcgtccaggtacctcgcacgtggaccttcaacgcatcctccaagcgcagttggttgccgctttaaagtacgctaagcgcgatacccagcagcgaccggtccaccacgacacgagtccgtcgcccggacccctggtacgtgctccagatacccgggtacgggacacagaacccctgatgcgaacgcccaatgttcagctcgggtaggaatgaccgaaagttcgataggatgcctgataagagtggacacatgccgaagccaaaacgcgtagttatccagcgtatcgtcagttgttgacgccaaagggatagcctccagcgcagttagcatgagcacacacggtattggtagggcgatgcagacaaaaacggccttggcaaagctggtttgttccatgaacggctgcagcttttgtatgcgatcgccactcacccgacgttgccacagcagatcgaagacatcgccgacaattgtccatggtctgcgacgaaaaaggcgtttaccactgtcgagctgacgaaatatccacgaatagaaaacttttcctgggtgcccaacgacaaaaatacaacaacaaaaatacaaaatgacgatttttattgaaaaaggcagcaacacctctacgaccttatagtgcaacgctaatttcatttccactcgcaagacatctgtaagtagccacgccgagaaagtgaagctcctcagctcatatccattttccggtaaggagcttgctacattgtcatcttccaaaacgatcttcatgggggggcaaagcagttcattcgcaggttaggagcaagttgcctggcaagtcgtagacttgttgaggcgccccctgggtgtggtcgaggtgggtagcgcgcgagagccgtcgcttgagcgcgcaaatctgcgaatgactgcccgaatagtaactactccactaatcctatcctatcactacaattctctatcctattcggtcaatcgtaatttggtcactcctggtccatcgttgtcccaggtcggcgtgccgaagcagagacttgccgtttgaaaaccccgatatccatataggatatcattacaacctgatggcatcgtcaactttagatatctggtgttcttactggagcagagcgcgctcatgggccacgtcgtagtcaacgaatggtccttcacgaacagcctcggggtgcttgttttccacgccgagcttcagatgctcccagttcactgtgctcttcagcgcaggggtctggtactgcacaagcgtatacaacaaaactatcattagtacgacatgctaccgtgatcatcagttgcttcgtcgaagtacttacgtcaacaacgacagggaaatccgtgagatgtttcttgtcagtcttcttctggtaaacgtccaaacggatgaggccctggaaaatccgcacatcggcttccgtgatgcgcttgtccaccagatagcgctggttggccagtagtccattgagttttggccagtgcagcaaagattttggttttctctgtctcaacgtccaccgcagttttcgcaaacgtcaatttgaggtagcccatggtgatttccgacacgattccgtcattcacagcgtcaatctcggcgcgcagctcctccgggtacaagtgcacgttggacggcaccagctcacgaaagcccgagtccagagtgcgcaggatggccgtggacccctccgacacgatggtctgcgtcttcgtgtcccacagcatcggcaccgagaacgtgcgcggcgctgggtccaccttctcgtacaggtcacgcacgaaattgacgccgttgacggtgtcggggatgcagtcggacgtggagtacgtcttgccgtttgcagccgtgtaagtggaggacgtcttggggtcgacgaaggtccatcccttgtgctcatcgttggggtcatttggcttggtcttctggaacattgggtgtgcgatggacactccgatgacgtcctggagaccgagcaagttgcgggcggacagtgcacggcaggcaaacgggcacgagtaggtgacgtagaggtggtagcggcccttctcagccgagaattgggcgccggtgttgggctcgatctggaagtcgtacggggcgggcttggttgcggccattgtggagagaaggtggtggtggcggttgaggtgtgtgcacttggcggcaagttgcggaatgaatcgtcgagtgcggaacatcgtagtgtttgttgttgtgactcgagatcccgtacctggcgtgattgccaatcatgctttctgtttgcgggtcacattttgctaatcaggtgggtcgacctaccctatggaatgttgaacctatttaaatgcatagcttcaactgagtgctcgtctccttcaactaaaccgagccgttgtgcagggcttactactcatcgctaatgcttaaggaatagataaaaatagataaaacaggacatgcctgcccacgcagcaggtttcgtagcggctagatgtccttctaagcgaccatatcgtcgaaataacacatgcagcgtctgacccgatatagcttccagctaggctattcatttcttactcgcaatgccagactctgcagtacaaccggttcaaccgcaagacggtgaagtatattatctctgtgttataccgggcatcgtccccttgctggaggcacaagtctacggggaaaacgaattatctggctggccgttgtcttcaagttgaactccttcattttccatgtgatgcataagatgaccgacgattgcaaacaatgaattgcaatcacggcacgtacgggatccactgaatcacttgtcccttgctacgcacttaacaaaactgcttgccacaacactcagcatctctggccttagtcacaacaacaaaaacaccctcaacacgatgctccgcactcgacgattcattccgcaacttgccgccaagtgcacacacctcaaccgccaccaccaccttctctccacaatggccgcaaccaagcccgccccgtacgacttccagatcgagcccaacaccggcgcccaattctcggctgagaagggccgctaccacctctacgtcacctactcgtgcccgtttgcctgccgtgcactgtccgcccgcaacttgctcggtctccaggacgtcatcggagtgtccatcgcacacccaatgttccagaagaccaagccaaatgaccccaacgatgagcacaagggatggaccttcgtcgaccccaagacgtcctccacttacacggctgcaaacggcaagacgtactccacgtccgactgcatccccgacaccgtcaacggcgtcaatttcgtgcgtgacctgtacgagaaggtggacccagcgccgcgcacgttctcggtgccggtgctgtgggacacgaagacgcagaccatcgtgtcggaggggtccacggccatcctgcgcactctggactcgggctttcgtgagctggtgccgtccaacgtgcacttgtacccggaggagctgcgcgccgagattgacgctgtgaatgacggaatcgtgtcggaaatcaccatgggctacctcaaattgacgtttgcgaaaactgcggtggacgttgagacagagaaaaccaaaatctttgctgcactggccaaaactcaatggactactggccaaccagcgctatctggtggacaagcgcatcacggaagccgatgtgcggattttccagggcctcatccgtttggacgtttaccagaagaagactgacaagaaacatctcacggatttccctgtcgttgttgacgtaagtacttcgacgaagcaactgatgatcacggtagcatgtcgtactaatgatagttttgttgtatactcttgtgcagtaccagacccctgcgctgaagagcacagtgaactgggagcacctgaagctcggagtggaaaataagcaccccgaagctgtctatgagggtccatttgtcgactatgacgtggcccctgaccgcgctcagctcgtgtagggattgatgtcagtcttcccatcgccagacaccgcaagtgtaaaactctcagtaatactgccgctttcgacgttgataatgcgctagagagcgcagtgtcgggtgcttttggggttttagaaactagcattccaggagaatttattgccgcttgcaaatactttgccctctaaaatagacctctaaaatagaccacgcctgtctcttaatatgagtggacacgagataggcgagggatgatttcgcttttaggcctagaaactcggtttggcccgtctagaatggcatttctgcgtttccaagccgcaggaaagcattttggtcgggaaaacagagccccaagcttgcatgcaaacagcaatattgctgtttgcagatattttggccaacgcatgcttattatctcgtcaataatctcgattttaatccagccagctcttaattaagacctaggtctgatttatatatatcgccagtactggtctaacatgcaagcttggggctctgttttcccgaccaaaacgcttttctgcggcttggaaacgcagaaatgccattctagacgggccaaaccgagtttctgggcctaaaagcggccttcaccaaagcacaaagctaaaacagccctcgcctatctcgtgcccactcatagtaagagacaggcgtggtctattttagaggacaaagtatttgcaagcggcaataacactagtataacataaatgcagtgcccactacactacgctgtggcttagtacacattcagtcttggcagcgttctacgtatcgttggtcactcggtggttgcagatcgggcagctcattctgatgttgagctgcgggatcaagcactcgtcgtggaagcggtggccgcagtgcagcctcgttgtgtagtagtaccggccatcggctgcctccattgctacgtcacataatgcacacgtcttgggaggcccagcgtttgaagcggatggggtaatttcggcttcggatgtagccgcggacctcgagtccataaacgaagatgtctctgtcaggctgctgcaggaccgcagactcctcatgctgcggctcgaatttgtcatgaaatcgtccgcatcatcggacgtggaggtgagcgagtggacggagcctcgggcacggtgctgctggccggcaaacgcccactgcttgatggggaactgccgcgtgtcgccgccgcagacaaagtccagcagcgcgtccgccacggcgtctgtgagcacacgacatgagtggctggccctacttaacagcgagctctgcagtgtcttgacgtaggccacgagcgcctcgcagcgcttctggacgaggcggtcggacgtggccgagtggaacagccgcggcttggggaagtagctggtcacgaagctgtagagccacgggcacggcgcgtcgcagcggtgacccacgctgagcgcgcgcgccaggcggcgctggaacgtgcggcagtcgtcgaaggagtacacgacggcccagcgccgtcccgagggcaggtgctcggccgacaggacgtagcgcacgtctcgcttgactttttgcgccgagaagctgaaggcgagctgctccagccacgcgacggacagcggcacgtaggcgcgggttcccattgtgatggacgccatgggcggacgctgctagctagatggaggagagagggaagtgagcggcgaggacgcgggaggagggggggggatgtcctcctcattaggtggaagggcgaaaactggacacctgcgtggccggtcgaagatgggtacagcgcaactgacttggattttgaatgctccaaaaagtgtaggctgaagggagatgagcgcaaggatcgcccgtttctgcgcgcattcgcgtaatcgacccagaacgctgaacggatttgtaaaggttttgcgctttgataacttattgtgctttgcaatgattttggcaatatgaggcgagatttgctgtatttatagcgaccacctgctagatttacgataaatcgaggtgcataaatgggtggaggcctagaattacgctaaaagcgccacaattgcacttttgaaagtgcaattgtggctgtgcagctgtaattctgtcggtttttatccacaagcacctacaaacacggcaattatgcataagagggtggatgtgctggggatcatggacggtggtgtactgggccaatgcatggctgctggcaggccctcccaagtcgatatatatatgaggaggtggatttatgcataattttagcaggtcgtgtatcttctttcacacatatttagaagcaggctttgccatatttagcgtctaaagtggtcggcaaaataactgcaaaacacaagaagtagagcttactctgactgaaataacacctcaatagtagcctctcctaggcactatcaagaagtttgtatggaaatagcccgaaccctatataatgattttcggccgccttgagacgttgtttcggtccggggaagtcgaacctctgtattaggaatttgtatgggctcgtcagcggaagcaacttcgttttgctgaaacaacatttggcagttattctgtgttaattggccaatgatcgaccaccttgggtaaaaaaaggtagtcgacagattttctggagaatttgtagattggaatttttctgaggactatggtgaattttgaagtgggatcataccaaaaagtacgagttcatactaaaaaatacgacttcatactaaaagttaccatgtgagtgtacaataaagtacgacctggtcggcatctcgccacgtgttcactttcaaatcggcgcgatggaaggcgttcgcgacttggtgaaggaaggtcaactaacggcaagcggggtgatcaagaaggcaacgcagacagtgtgcgagtcgagctttaaaaagtttgcagagttctgtcttgccaatcgttacccagacccccatacggagcggcaccacgaacttcccgcggtgttggtagcgtaccttcagagcatttccgcatccagtaccgtgtcgctacagacggcggagaaggcaaggtctgctgttgctagcttctattcctctcacgaaaacagcgatggaacagacgtaaatgtggtgtggtaattccactaaaatcctcctctaccaaaaggtattagaggcaccaagaacacgctaacccgcaaaggtaagcgcttattggatcaaaacctgaagaccaggaacgatcccttacaccgggtcggttgcaagcgcctctgttcaccttaggttgtcttcggtcaacccaaaaacctgtaccgctagccacgagctaaggctaggatactatgtagcgctttcgcgcaaccccactgcagtccctcagaaaggaagggtaccggcgtgttaggccttatacagggggaccaaggtaaaacctcggtaggtagactaatacactcagggacactctaatcccacaaatatatactgaacgatactctaataccgttcctgcctctccggccacgccaactcttggcgctgccaaggaaacgctcggtcaatgcacgataagctccccgacaggcatccacacgcagccaagcgtgtccaggcactacaataagctagctacacttaccgaagtcggacttgacccttgttggctttgggggaagactgtctttttattactgagttttctgaggccctgggggcctcgttctggccatcctatgatgagtcctatgtccctatacaaatatctagtgtgaacgatcgcaataaggcgattccggacacatcaaatgacgaccgcggctacactgcggccgaagtacgtaactaaatgcatctgtacctaaaagtgggtaccatgaagcctcgttcggggttctattaggacccgacgaggcttcggccactgcctgtcactctaccgaggataatgtcatcatccaatcagaagcagccatccccgtctctcgcttgacctcgccttgatcgccccttgattgaacttgattgtcgggctggcgggtcaacagcgttggaaactgccactttccaataccacataaacaagtggagtgtgctcgtggacgacactggaacaaagcgtgggtatggaaacccggctcgggatccatttgtccgccaatttatgcgcggtctcaagaagaagaaggctgcggaatacgtacctgctagggctgtaccggtctcgcttcaaatgctgggggttctgcacacgttcctggattcgccatctgcggtcggtggattcaccgaagaaagccgtgtgtggttcaaggccgtctcgtcattcgccttctacggcatgtgccggatcaacgaggttcttccgctgaagtggagagatgtttctttgcgtcagtatcgagccaacgtcgtcacgccagatgaggttattgaatttgggacgtacacactgtttaaccgcaagacagaggtggcagaggggcgatcctataatcttcacaacctcgcggacgaagaaaccccgatcaatgcctacaagcacctgtgcaattgggtggactttgctacgaagacgaaaggccacgtatggagcgatgaagactacgtactccctactcttactggcctcagtaagaaagctcttagaagcgacgacgataccaccggctgcgaaaaggtggtcattgggtggggcaagaaaatgggagaacagagttttatcacgctactcaactgcatcgtgggttcgctgaaccgaaagggacaatcgacaccgggttacgttgcgaagcattggtacaacagttggttcacgtcacacgcattacgccgaggaggggctcaataccgcttcatgtacgcaaaaccagcacggcgctggtcgttacggatgatcaagtggtgggccggctggagtgtttcggaatcgacggagacgctggtgcgctaccttctggatctgactgttcaaaccgaggacagtgaactcgcagactgtttggcaccggacaagagttatctacacggttgcccaagcgctccttatgaggctagcagaaacatcgaagaagggcccgttctcaagcgcattcggcaactggagacactaatgctcgagactaaatctcagattagtgagctgaaaggtttggttacgtctgggaccttacccagtctgtcacaagcgacagcacgcgaagatatacctccaggtgccgcctcgaataggcaagcgctcagtcctgcggtttcagcggctagagactggagtcacctatgcctgatgtggtggtttccggacacctcggtgcacttgttcaagcctctttcagaatggacgcaagccgagagaaccaatgctggtgtagcgcgcagttggttcagcgttgccaaattgctcggtgaggatgtcgccgcgttcgctaaactgatgggcgagtccgataaaacgcgctgggagagggccatacttccagtatttcgcagtttctacgcccagcactatggcggagcggaagaatcggccactgagcatacgtttacgatttcgatgctggttacatttgtcaggaaagaccgcaagcttcgcacaaacgcagcgtgccccgcaaaagagttgccggaatactctacgtacctatagctctaatcacgtactaaccagtatgaactcgtagatagttgtatgaactcgtactctttagtatgaacacctcgtactctttggtatgaactcgtaccttttggtatgaactcatactttttggtatgaacgtgtggtacatttaagcagcttagagagatgaaaaagtcgtagaattcatctgtcttatgtctggcttctatagcacgccccactacttgtcactcgtactagctgcgtgcttgaccttgatgtaggacgctttgtactcctggaaggtagcacatggcccgacccgctcgagtttcgcgatacctgctttcaacttggtcacttgggccgtgtgtgcggctttggccttctcctttcgagcttgaaattcagcaagatgacgatctttcgctctcaagtaccgctccaccttcttgcgataggcacggaagttggtcaccaacgtctcatagtcatactcagcacgagcgtttgccttacgtgcattggatacgcggcgccgctcgttcatatactcaacatccgtcattgcgtcaagttcgatttgaggcctcatctcggtgtccgccgtaagtccattcccaaacacggtgaaagccttagccgtcgtgctccagtagttcatcaacttatcggtctcctctccaaatttgctgatttggccgcgaagcttgtcggggtgaagaacgaaaatcgccacccggtagagctctctaggagaaaccatcgatgccttcagctccgcgaggaaatgggcaaataggtccggatccaaactgacaccatagagcagatcctcggcgtcctttgttttgggtaatgtcgtccaagccgttttctccatttcctcaacctccacgccctgagcctcgagctcagtaagctgcttacgagccactacatattccgcatgttagatttaccaataattgatatcattctaacaattatgtaccttccaggcggcggaattggtcgtacacgcgcttttcctgtagcttctggaggattttgtccttgttcttcgcgtaggaatcgcggtttatagccttgcgcgacttcggaggcttcttcttcccgcacactttgcggtgcttggccatgttcgacttcgacacgagcttagggcacgtagggcacttgcccttcggtggaccgtcaccgccctccatttccgaccaatttctacgactgagagccggaactcccattcaggattcctcgacgcttagtggtcaatattatttttggctgatcttgcatatgattggctgaaacaaaatgttatttggcgttatttcagggaaagaagtgaaaatccgaatttattcgtaatagttttgacatgaactgccgggttctttcgtggtaaagaacgcgcaggtgcgtaaacaaaaagacgggcttcttcagcgatgccctaggtacgaattggtgtgtcgaacttactctttcggtccgccagggtcattttctcatgtccgacagaagtcctacccgtgctcgaataccagcagaggtcttacttgtacgatgcccgtgcttgcatttttgctgtgcgcggtaggggcggaaccgttcgggctccgccgtgtccatcttgtttggggaaaatgactgaacccgtggtcaggggaacttaagtgcagaaggcgtggtaaaaggtgtctgaatgatggtcattttttgggcccctggttatggctggggtagcttgcgtagctgaccagacacaaacctcctctcctgaagcttattcgggttgcgcttgcatctcgctgtcaacactgtgcatgagggagcaacatgaaacatctataagcacccacggcgctgaataggcgtcctttaagagaacatgggccactaaaaaccgagaggcgttccatcagtgcaagaatacccgcgtaaggtccattccccacatcggtatataccttcttgagggaatctaattgtacatgtgctcgtgtaaagctacaggacttgcatattgagcgctatgaaaacttctctagccaaacaccgagtgaatccttctcatagaatttgacataggttggtacttagtacgggttttgacaatccaaaagtattcaccacaccttctgtcgcacaagtcggattctgtcatttggctcggccctgaccacgcctttacacctttgccagtccaatacgagacggcaaggaaagcaaaacgggattgtttggatacaaattgttttgggcacaagatgaaataattaaattgggtgatttcaacgcaaatgagattaaccccagggcaaacgagattgcgtgttgcttgcctttgtagcgagtctcgggacacctgctcgtcggtgggtccgcaagctcgctacagtgctgctgcgggcaaggtccgcggatacagaaagacaatgacacgaactggccacactcagcagccggaaccccgctaagagtccctatttattcacttgttcgtcaatcgcggccacttcaagtcggcactgcaatctcgacctctgctgctacactacacgactttacaggtgcgctccacgtcaccagcaagcctccggtcaatccgtctgacttgtcctgtctattcgtagctcgtcctgtaatgtcggcagttgctgctgctctactgttctgctgttgctgtctgtggctgttgctagtgctcgctgtctggcagattgccaagtgagccctcgcccgcgaacagcccgtcgctagcctcggacgccctcagccatcggttcgctcggctgctatgagccgctcgtgcgttgcttcggtgcccctccgcgcaagatcgcgcctcgcactcgctgttggcgatctttccgtctgtaaccaccgtccttcgctgctcgcctcgtagtgtgagccagctgcgctcgtgtactccttcagcatgggcctgctggacacactcactgtcacgtactcgctacacctttatgtctacgccccatactgcatgtcctccatcttcaacgcgtccgcgacggcgcgctggcagtgcagcgccattgagaccactatgtgtcgattcatgcagccgatcgaggagttggcagcgtcctcaagtaagcgcatccttgcctccgtcatgcttcgatgcgaaccccgttcgaacatccgctgtcggtgctccgacaggtacgcctttactttcgccttgaagacgctaaaacaccctgttgtagcaaatattataacgcccaaatagaagagttagtgtaagcgcattggattgtaggcagtattcgcgcactccgtaccttcaatggggttcagcatcggtgaatatggcccgaggcgaagcagctcgaggtcaccgtgctcggcaatgacctcctccaaacgaagctcgacttggttatgggcgggggcattgtcgagcacaatgacgaccttcttgcccgcaaagtactcgcagtacgtgtccgaggtcttgaccgtctcgtagatgcacttgacgaactcggcgttgacgtccatggtgatgctgcctcgttgcagctggtgcaacacgagtccgtcctccacggacacagcacactgcaactggagattcttacctttggaggggggcgtcttcactacagccctctgaccaacacgagcgcgtccttgcgtccgcatgcagaagaggttaaagttgctttcatcgtagtacacgatgtagtcaccgctggcctggtggctaataagctttgcagcaaacgtgtaacgcttggctttattgacgtcatcattgcacgttgacggctccttacggatctacatatacagtaacaaatatatcacagtggtaagcaattacacgtgtagcaattaccgtacagtatacaaaatctgtttttacgtaataagttagccagcaggcttcgcactaatcgtggatgtggagacgttgaccgcgaagtgctccatgagcttgtctcgcaactgtacgagcgtcaacgtgcagtcctcgtctaagtagccctccagcgcctccaccattgcgtccgtgcacttgacgcagctggcgcgggcaccgcctctcggaggcgggctgggatctcctttcttgcacagcctgtacgccgccgcccgcgagacgttgttgtatttcgccacggtgagccagtcgttgccagccgcgaatgcattcagcacacgctggcgttcttcttcagtggcagtgcgccgcggcggcgacggcaaagccagagctcttggcgactcggacatgcggtcggtgtggggcgcggtagattgcgctgctaaccctggagctaatctcgcttgctccatagccagtgatataaaatacgtaatatatctagattgggtaaattacctggtaatattccatctatttcgcattgctctggcaccatctcgtattggactggcaaaggtgtagacattttcccacttgtttcgtgcgactattgcaacgacaaaattcaccaatcgcgctggcatctgcggatcaactggccccgagtgaccgcgcgccgctgcttcctcactgcgcactttggtcagccgccattgcgagctgcaaaagaacgcgatcgatcagatccgtttgacaccgcagcaagcgagtcgcagcatcttcgagaagcctgcagtcgtcaacggccgctggcagagactcggtacatgtggcttcactgctgcgctgccgccgtagcgccggcaatcgagtggaaggcacgcagataccaggaagaagccttacacggggtggacagccccaccggtagcaccgttagagggtggagcccgagcccccgctcggagcagcaccaagtcggtgccagcgcgtcaacgatccccgttgaataatctgcaatgcggtgccgccgcgcgattggcccgaaaagaacactttgtcgctctcccattggtgcaaatacgcggttagggcccgaaaattccatcgtaatcagcggtcgtcccatcgacttgaatgatggtctccgctacagccagtcaaggttgctggccatggtgatcattccccaagattccctgtagaaagcatgcacaccccagtcatgaaggccggcagcctgaagcgcgccaagccgctggcgctgcccgcgagcgtggcgtggatggagcgcctcagcatggacatgaccaccaccgccaacaagaagcccagcctcgtcaagggcaacaacacgctctaccaactgcagctgagctgcacgcccgtgcagggccagccaacgtcctggaccgtgtcgtgcaccttcgacgagtaccgctcgctgcagcggcggctggtgaaggcgctgcggcccggccacaagtgcaacgccgagtgcaagtggctcgtgaacgtcatcaagaagcacttccccaaggcctcgctcttctgcaagaactaccccagcaccgtcgagagccggcggctgtcgctgctgcggctcatgaccaccgtcaaggcttcgctcgtcaaccacggcaacgtgggctgcgccatcttccgcgaccacgtgagcgaggagttcgccgccttcttggtgggcgactgcaaggacgccgaggtgcagaggctgctcaggcacacggcctcggcctcagccgcatcgacagcctccacgacgtccaccacgtctcgcgacgagggcgctgcagaggacgagctcacggcgtccgcggtgtcgtttacctcggacgaggagaacctggtgctggacttcgagttcgacgacgacttcgccgacttcgagtgcggcctgtgcgggctcagcctggacgccgtggaggaaggagaagccacgtgcatgacgccgtactgcaccacagtcacgtttgagtgcggccaccagttccacgacctgtgcgtgctgcctcgactggacgaggaggccaagtgcccgctgtgcaagtaaagtcgccgccaagcagataaaagtgataatgcagatgtgcagcagcaaactacagtgtatctttcgttgagttacatggttcctccggggtcgttgcacttgatggcgagtcgagcggcgaggtgtcgagaaggaagcgctcgggcccgtggaagcaaagctacacgcagcgtccatgcagaagtgtccttgcagaaatcggccgccgcgtttaacgccctgctgagtgactgcagtgtctccccgtccactacgaccagggtggcacctggactctgtttcagttttataagggcgagtcgtagcagggaatcgtgaatccaggttgaagcgagccgcgttgagtgctgcatttgagaccgtcgccctaattgcccgctctcgctctcggccctcgttgaagctcgatatccagtgcgagcattgggagcaatcggatgactcccctgcgaagcagcgggaaccaaaggcacacttgcatttgtcgacgaacgccctcgagaccagtgctattttgccgcttgcccaaaacttttgttgtttttccgaacgagttgaagtgtatgtcacaagcacctaccagcaacggttttgccgccggacagcggagacagccagcaggggaagcaagctgtcgctgccaacgcaagggcaattaaaatgatgctcgttgctgcagcgacgaccacatacgtcagtaacttctgcaccaggtgtcctccagccctgggcgtgctggtccgagttgaagcaaacgatacattcgtatccggtgtcgcgacggcggtgttgagaccgctgcacatgagctcgctcatcaagagcgccgtcctcacgttggtagacgcaagtgcacccacatgaaaaaacgccctcgcgcagggaggaatcagcgctgacatgcagctcttggcatcgaacacgctcatgaatgctactgcccgaaatttgcgctgtgtccgaccaaccaacggccaccacaacggcttcgcagggctcgctgtcagcagcgcgctgattgccgggcgtgcctgctcttgcccaggcgaattccgagtccttcgacgcggtgctgcggacaacgcttgcagccatcataatgtcgcatcttcccggccgacttggggccgacctcattgctcaatttgcctcgttgcggccagagcgattcaccaaacgcgatccaaaacgtcatgggcatctcgtcgtgcgcttcaacgtgcagcacgccgatcatcaacttctcgggctactaccgcaagcgcgcggcgtccgtggagctaccggaggccacggcgtggctcgagcacctgcagatcagcctgcacacagtcacgagctccagctcaggtagcgtcaagggcgccagggtgcagtacgaggtgcgcgcgagctactgctgccaggacgtgcccgagctcgagtggacggttgcccgcccctttgacgcctacaggcgcttccgcaagcagctaatgcgcaaactgaagccgggccacgcgtgcccagccgagtgcaagtggctctacgccgtggtgaagaaccacttccccaagcccaagctgctcgccgccaactctccacgcacagcggaagcgcggcgacaagcgctcgtgcgcgtgctgcggacgctgcaggcgtcgctggtcaaccgcggcaaccagggctgcaacgtgctggtgcagagcgtgtgccgcgagttcgccacttttatcctgggcgagaacgccaagctgcccgacgtggtcatggcgctgagcggctgcagctcggaccagagcacgcgcgactcgtccgcgtccttcgtgtcggagtgcagcgatgatgaagactacagcgaggacatctcgcccttcgacgacttgtacggatgcaggagcggccgaggattctgcaagtccgagtccggtcagtgaaacaagcagatagaagcgacgatgacatcgctacaaaactatttaccgacgagaaaaacagcgcagcacggccagcttcgacggagcagagcgatgtcgtcgaggagtcaaaagagaatcaaggctatcgacagagaactgcgaagagctcaacaggaggtcgacgagcaagcagctcgcgcagcgttggacagactgacgcgcctctgcggaccgcggagaaggagaccgtcgcagcatgcatgcaagcgtgtacatttgcagtcatcttcagtaccattagcatcaatccagcttgcgccatatgaatgcttacggtggcttttgggctttgcttttcgtcttgcacagcgcgttgctgcttaaagccacatcacggccgtcattttcctttcgaggatgccgctcacttcccaaccataacgtcctctattggcaaagccaggagtctttgcgcaagagatcaagtgcacgcaatgcgttgtacgagttgaagtagctcctgctgggacttcaaccgtttccagcgggccagcagcgtagcgccagctcacttgtccacgattgtgttctacagagcgctatctacacatgtacatgaatctaagttgacttcctgcttgttcgcacgtgatctaagctgtatgagcctgtatcgcctccatctgctgcgagctaatgtagaaccctgtggctgttccacatgctcctggtcgagtgattccactgcctgccgccgcgctcgtgatcggcgataactaacgggttgtgctgggcaagccatgccgcggcggagcttccaattccaacccgtgttaaacgccgttccaccacacgactgacttggacctgccacattgatctgagcccgatcttgtctccaggcgcgagctaagcgctgcggagctgcagtcagtcttatccccggcctctgcgcaggtatctggccatgtcacccgctatgcaaacttttaaagttttcctgcgcggtcttctggtggtcagcgctgtgagttcaccgccgctcgacgacgacgacgggttgcgcctatcgcggcgttgcgagcgccgcgcgctccccgggcgttcgtctccaattctgaacaaacgccccaacggatgacccgcggcgcgccctcgccctcgccgggatcgcaggcgtcgcccgcctcctcctccatgagcctcaagagcctgctgcacacgccgatcgccgagcccgagctggtcgtctggctgcgcgacctcacgctggacatgaccacgagccacaagccccatcagaacgtccgcttcgagctcgtcgtgcgtcgcaagcagcccaaggcgcagctctcggtcgaagccgcgtcgtggacgcacagccggccgttcagagactacagcgcgctccggaagaacctgctgcgcgagctgcagcccggacacaactgctccgccgagtgcaggtggctctacacggtcgtgaagcagcacttccccaagacacagaagatcttcgctctatgcgcgttcaagaccgagcggcagcgggcggcgctgttgcgcgccatgaccacgatccagtcgacgctcgtgacgcacggcaaccacggctgcaaggtgctcatgggggccgtgctcaacaccttctcgacgttcctagtcgacgacaggacgtcgctgtcgaccaactccgtctcgctggcgctgcccaaccgtcaaggggtgtttggcctgcccagtagtctaggaagacggctcgccagcctccgcagcctctctcgcgtccgcgccagcgccagatgagagcgggcaacaacatcttgtagcgaagtcctcggtgagcgaacgaagcgacccgggcgaccaacgtaaccctgtacacgtacacgaacttgtcctaccgctgctgaccagcggccacggcatttcaaatcgctcctatctaccgatactacatcctttagttgaagagctgcgcacacggagtgaggtgacttcgttcgcaatcgcagcttgaatcttgtgatatatacatgacgccaacccacttggcaattccagggctgcatcttccctacaggtgccatcctagcgagaacaacacgaatccagcgcttctcacgggttgacgcggaatggaccagttgacgcgcacacacattcttccctctcacttcaactacgatcatcactcagtgtgcaagtacatgtggtgtccgcatgctccttacttgcatgtgcaatgcgggatccggtttgccacgtgtgctagactcgcgtttgaggcggacacgtcggtcacgtgactacgattacatgcgcgcgcggacggatggataagctacgtgtagcgtgcgcgcgtcgaagctccgctggaatttcgcccgcaatctactgcattgctcggccatcgtggtgcgagatggttgctgccaatctggtcgcacccaggctcttccacggcttaccgctttggctacatgcacagctttcgggcgcgctgtagagcacagtcccatcaacaccagcgctctgctcgatcccgagattccgcgcgacgcacgccggaaagcgagtccgagttgaacataggcaagctgaagctccgggtttcgtggatttgccggctatccaggagactgtggagttccgttgcttcagcccacggctcggcgtcaacacgcggagccaccgagaaaattcgtcgcggacagcgcttacggctccggctaagcgatcgtgtggagcgcccataatcgtctggccggagccagccaccggttgttgttaagtcgcctgggccccgttttggtacagttcgagcgagcgaggtcgaaccatttcagaactctctcacctgtaagtactccgtaccatgacctcgcccaccacagcgcccatgccggcctacaactcgttcacgtcgcggaaacggtcctcgccggccgtcaagccgctgcccgaggccgtggcgtggctcaaggacctcaagctcgagatgaccacgaccaactctatccgcagcgccgtcaagtacaacctgcgcgtccagtgccagccccagggcgccgccacctcgagctgggacgtgtgccgcacgttcgaccagtacaggtcgttccagaagcgcctgctgcgccagctccagcccaagcacagctgcaaggccgagtgccggtggctctacagcaccatcaagaagcacttccccaagcccacgctgctcggctcgcactgcccgccgatcgtggaccagcgccgccgagcgctgcttcagctgatgaggaccgtgcaggcgtccatcgtcaaccacggcaaccgcagctgcaacatcttgatgtccaacgtaagccaggagttcgccgccttcttctcgggcgacggcacctcgagcgccgacgacgcgacgcccccgctcacccccacggccggctccgagatggagaccgggtccgtcacgtcggacggcgaggaggaggacaccgtcgactacaacatgaacgccttcgccgactggaggctccccgtcgagcacaacccgctcgagcgcaccagcagctcgcccgtgtaagccaagtatctaatatttaagccccatagaaccttgaaagcctaagcaatagaacacgtaacttatgcatccaaacgaacgacccatgtcattgtcattcctggattctggtatcgggtgtctgacagctccgtgcaggagccaaaggtggctgagcgcttccatgcgtgcgttcgttcgttgtccactgcatgacctggagattcgagcgccgattgcaagccttaccgcccgccacacacgcgtcaaagacaagcttgcacgatcgcgtgctggcgtggcgtgctgtgctgtgctggcactggtaagatcgttgcagtcgtttcgacgagacccacggccagctggacgggtgtgcgcgcagcttcatggcggtggtgccgctgccggctggatttttccctcgagtgtggacacctcaagagcgatctgccaagctgttgctgctgtcgctgcatcggtggacccgcgcatcgtctcatgagcagcgctcaaagtgggcagaagttcagcacgacctcgcgaagctcaaagcgaagccatcggtttgctcgaacgcagggtaggaacacggcaacgacgcggcgacgttacgacggacaagatcaagatgggaccaaagattcggagccccggagctcggtctccgtcgccaagaagcgcgtcggcgccgcccagtgcaagtccggggctcgccgacagcgagcgacgcaacgtcgtccgctcgcacaacgagcgaaacgccaacggcgacgacgcctgcgggttggtcttgctagctacaatagctactgctgctgcaacatggcagagaaatggagctatatcaggagaactatcggcacggagaagaaggagaaataatctctctcaatgcaggtgctctctcgactccttggtgtgcgtcacgcgagctccatcactcggaagtgggtgcgcaatcctcctcggtcgttacacaagacgagctggccaatcgcaggccgccaaccgggcttaagagcctgtcgggtcgtttggcccggtcattctacaactgggcggaacgttcacttcctgggcagcgatcagagccgcaagtcaggcctcccaacgcagaaaagcgcggaaggatcgctcagagctcagagcagaaaagaagagagagagagagaactcagaccccacccagcacaggaccggcagaacctactagcatttttacagcagacagcagcaacaggatcgcaatggtcggcaccatgatcgagacgtcctcgtcctccacctgcagcacgagcactagcagcagcaccagcagcgggggcggctgcgccggctcggcgccgcgctcggccgcgtgcctcaagcgcgccggccccatggccgtgcccgaggcggtggcgtggctggaccacctgacgctcgagctgcacaccgcgtccatcagcggcaagccgcagtaccagctcaccatgaagtacacccccgcacagcagaagctggcggccgccgcgacctggaccatctatcggccgttcgacgagtaccgcgccttccagaagcggctgctcaagcgcatgcagcacggccactcgtgcggcgccgagtgcaagtggctctacaaggtggtcaagcactacttcccgcagaagtcgctcttctgcaacaactgccccaaggtggtggcggcccgccagcagacgctcttccgctgcctcaccaccgtgcaggcctcgctcgtgaaccggggcaaccacagctgccgcgtactcgtgcacgacgtggccgccgagttcaaccgcttcgtggtcaagggcatgaaggacatggccgccgcggacttgccgtcctccgagctcagtgctgtcactcgcgactcgctggactcgctcagcgagggggaagaggaggaagacgacggtgacagcgagtccgaggacgagcaggagggagaacagcaggaggagcgcgagtgcgacgcctgccacagtcgacacgtcgtgtgccgcacgcacagcagcgtcaaggcataggcgagtttgagaagtgggcagtgtacactagtcaagtagttcagttagttagtaagtttgtagttcgatacgggtcggtaatacgagtaagctaggacatgtacaccaaccaatctaccttagtcatgcctgcgagcgcatctaaaacgtcatagcagcgacattcccttgtggtcaacagatcgatgcaccagattactccggcgaggcgagctctcgtcaatgcagactttgtcgcaggaaggatgttcatgtacccacttctaacggatatttgaagccatctacgttgaagcgaccagtagaaatagtcatttggcgatcatccggcagagatatatggtgggctcgcgccgcgtccggaagcgctcgacgtcggtgtgcccgctgctgccgacgtacgtggggctgctggagcctctgcagctgtcgctccagtccgcgcgcgacaacaagcgcccgctcttcgtgctgcaagtccagcgacgcgccaactgcaacgacggtacatgcagcagcagcagcgtccgcagttcgtggagctccccgcgcccctttgaagactttgaggagctgcaccagcggctgacgctggcgctgcagcacggccacttctgcaacgccgggtgtccgtggctcttctcgttcctgaccagcgagttccccaagaagcacattctccagcgcagctcgagtccgaggagggtcgagacacggcgagccaagctgcaggagctgctcacgtccacgctcgagttcctcctggacaggaagaaccacgcctgcagtgtcgccacgacaaacgtggccaagctgctcgccgagtttctttacggggaggacgccatcgcgcagtacatcctcgagtcgtactctgaggcggagaccacgtccacgagcaacagcagtcgacgcaggagcctgggagtgcagtgcagcgaccaagaggacgctaccagcaaccaagatgcttccagcagcagctgcagcggagaagtcggcggtctcagcatctgcggcgtgtgcaacggagcgctggtgcgaagccgatacagccaagtccgacagcggcaagggtgtgggctccgatgtcagccccgccaactctgcccgaggcaggtcgtccgtctacgcgacggtgttgaagtgcggccaccagttccacgacgagtgcatcgtgcccgtgctgaacgagacgctgcgctgcccgacgtgccaccacctcgagatccagtgactgcaatcgggacaccagtgtcggatcgattaaagtgagtcgtgagggcaggcagcaccttgattaaagcgatcgtgggggtaaacattctccactgcgccttgtcatgatcaagacaatccagtcgccatgaagtcacgtggatccacgcgtgcgctgcgctaatcgagcggtgcagtctgattacaccgggatcaagcgccatgatcaccagcgcatcaacagcaaatcgctcggtactttttcatgcagtgtacaggttcacagtctgcgattgcctcagtgcggacgcacttcacgaccgcataatccagcagacaagcgcacgaccgaccagtgctggtctcacgtggccgcccagcaccgctctgcagcctttcattgcccaatttgccccgcagcaactactgtaccaacaccaacacgttccgttccccgcttgcactgatgtcttccggctccagcatgtcgctcacctcgcgccgtcgtcgccgtcgtcgcgcgacggtcgcaggacctcccggaacgcccgtcaagaatccgttgcccagtccagcgtcgttccgagtcccgaccatcgcgtacctggaccagttcgagctgagcatgacggccacgaaagttaagctcgaccaaggcaaggacgtccgctacgagctgatcgtaacccccacgaccgacagctcgcagcagtggaccgtgagccgctcgttcaaggagctccaggccttccagcagcggctgctcgaggtcatgcagctcggccacctctgtcacgccgagtgtccgtacctgtactcgagcctcaaggggcgattccccaaggagtgctacctctactcgtccagctcgtacgtcatgggcaagcgccgccacgccatcgaggagtgcttcaccacgctgctggaggcgctccgcaagcgcgagaaccactcgaactgcagcattctaccgggcaccgtggcgcaggagcttatctcgttcctgaacgaggacctgccgatcgagcacgagttccgttgggagaacttcgtgagcttctccaagacgccgagcagcagcagctcgaccttctacagcacggacggcagcagccgcagcttggcaacccccacgggcggttcaagtcgctgctggcactcgaatagcgacaacagcctcgactcgttcctctcggccggcagcagcaacagcatcaacttgttggacgcgtgcggactgtgcaccagcgacgacgcggccaaggggtcgctgaccgcgctgagctgcggccaccgattccacgacgagtgcgtcgtggccaaactcaacgagacgctggcgtgccccacgtgcggccacgccctgagctgagccgatctatattcatagcgatttcatgtacttattcctgtcacttcaaacaccgaaagcgaatccaacaaacctgcttcgtgctttatcaatcaatcgatcaataaatggacccagcggagccttgacttcgcgggtcttattcctagttggggacgaagtccccacttataatcttctatccctcctctttactctatttcttacctctctttacttacctctcttcacttacctctcttaatctgggacatgaacggctagggtttacatctagaatcacttccccggggccaaaaattgcgcaaaaaacctcggttgaacaaccctctcttgatccatagacacacttaactgcgtaaaaactggagtggccccttctgagaaggggtcgatgccattaaagtggggggacacgatttagcctcgacgataaacgctaatcaaacaggcatcgggaagcgaatcgcgggtttagataaattgctacactttagatcgcaccgagcgcaaaaaaaacgccaccataatgaagacctagaccagatttatatatctccccactacaggtctaagatgcaagcttggggctctatttcccgaccaaaacgcttagctgcggcttggaaacgcaaaaatgcctttctagatgggccaaatcaagtttccgggccgaaatccgacctcatccaaagcacaaaagtgaagcagccctctcctatctcgtgtccactcatattaagagacaggcgtggtctatttaagaggtttattttagagagcaaagtatttgcaagcggcaatattaatataatatatggttattgtgcctttcacttattctgccgtgataattctggcatagctctattccttatcaaccttaattatgccccgagttagctatttccaattttattccgggttgcccctccgtggccgaattaggagcggcgatggtgaggccaagttaaggcggaataagctggcccagcctgcgttcggcggaaacagagcgattggcggtttcctacccgccaatacatgtcattctgctcgtatctgcgtcgatcggctctcaaatgctgatcgcgaaagcgatcataagtcctcggcttcactctgatttagagcgccaagtcagcgcttgcatccattactacgagtgagttagtgctgggaagggtagaattgctaaaagagagtgcacttcaacttgcctgcatggatacgtgctacgcaaagctcaccatgtccaatactctgtgaagctacagcctgtagcctacagatagctcctggcagtgacgcaggtggtctccttataccttgggggcccgcaccccacactacggaactagctccaagccgcaacgacgggttcgttcgctgctctgctggttgctgggccctcctacgcggacatgcttcacgggcaccccgcgcgggtttgctttggctgtgctcctcgcaaccacttgctgccgatagaatagagaatcttgcgatagtgtaacaatttttaaattgtgttattaataccggtaagtgatatggtataagtgatatggtatgtagcactagagaggaagtacggccggcatcgggagccgagatgctgtattgagtacgctggataatcgaaactgaataatatagcttttaacaacaattatcccttgctacatgtattttgctttgggctgtcggctaccactaattgatcttgaaccgctggtgctgcagctcacccttgcggttaaccgtgatctagggtttcgcgagatatagtccagcatcattagtgctctcttgctgctggtgtgtaattgccgttgattatcttgacctcgcgatagatagtaacgttatttgctgataatgaagacttcatcatgcagctccaccagtgttgctaattgcttattggtttgatggcctgcacgggttaaactgagactctaaattgcaacggtcgcgaacacgtccttagcgcttcactacactacaaaaatagtaatggtgattgataagatcaattagagggtggagacgtcggcctgaagtggagactccactgcagggtgtcgacccccgaagcaactcaacggagcaacgcgactgagatgctccattactagtagtagtcaaagccgttgaggcagacaaagcctaacttttttgcttcttcctcttcttggtgaccaacgcccacagccatcacatcaacatcacttcgctcgcatcaagtggattgtattggaagccggagttggtggacatcgtgccacgatctgcatcggaccgtgcgactcgcttcggcggtatccaggttcccaccttcaaagccgctaagagtgtcgtggacgcgcataagacgttgcgactggcttaacattgtattttggtgagccgttgctgctgatgccacagagctcgaaatggtgcaaagcgactcggcctaccgcacaatcatgttggtggggcgaaaatgacccgcagcccagtcctcattttggcccgaaccagttgaaaggcatcaccgaccgacactccgaagcgaaatgagctcgagccgccctcggaagaagcagtcgctgcccgtcggcccgctgccacctcaagttgcgtggctcgacggcgtctcgatggacgtgacgccgatcacctcgaacccgcggacttcctgtcgccgagtggactacctgctcaccgtcacgtgtcagacccgagactcggcaccatcggcgacgtggcacctcgtgcgcagcttcgacgagttccgcttcttccgcaagcgcttggtggcggctctgcagcgcggccacttctgccaggccgagtgtccgtggctctacacgttcctcaagagctactaccccaagtcgcagctcgtgggcagctcgctgtcccgagtggtggccaggcgacggaagacgctcacgcgcagcttggccacgatccgcagcttcctcctgaaccgaaccaaccacgtctgcccgctggtcatgcagggcgtcgcgcgcgagctgctcgagttcgtggtgggcgagccgcaggaccgacacggtcaagtatccgactggctgacgcaactgctgcagaggtggcgggacggagacgtggagctgctggaggatgcggccagctcggacgagacggcgtcaagcgacgaggctgcggcggacgtctgcgctctgtgtgagaacccgctggtgggggccattccgaaggactgcgacggtcccgagctggacggtggcgaccggtggtcgcagctagcggcggccgagccgttctcgacgctgtcgtgcggccaccacttccacgacgaatgcttgatcgacaagctcaacgaggcattgcagtgcccgacatgcggccaccaggaggcttggtgagagcggagacatttgaacattgacgacgtataacaatgtacggaaggaggagtgagtggctaggcaggcacacaagacttcgactgggtgtagtaaagtctgaacatggtaaacattgattgacatctttttctttaagtaagctcgggctgctgcatggcagaggctattcattacgtacgaccgtagtttaggaactgcacttgatgctgcggccgtagaagattgctggactaacgactaacgtgcaaaatttaaattttgtagagcaccagctacagaacagtgctagccagcctttcccgaagatactttccacaagtcctatcgcattcagaatcctcagcgggactcccgccgggagagcgcgacactggcaccgtcacagcctcagcaccttgctcggatctgctgcgctgttcaacatacaaatcgtggagctttggaagcaggcactctacgacgtcgtgcagttggcttgtccacttgtccaggagatcttccgccctcgtgtgtgcgtcatggtagcagctgaagcgtagctggtatacactctatgtacgaccccgaagcccgtcgcggaacactgaagcatttttttcatccggaaaatgggaatgcatggagctccagcacatggcggaaatggagcccaagccatggaacgacgcgagaagaacaacaaagtagtttacgcgttgtgcagccagctgcactgaccgctgcgcgtcaacgacaacgcccctgctatggtacatgtatgcgaagcgaggactccaatggcaggaaccattgcgattcacccacctacgtggcctcatacagtcggcgaccgtggaggtatgtaagtgcgcggttcgaattcttcgcttacgaccgcttcctcctaggcaaaagatgcactcgacgtcgccgcgttgtgtttagcgtttagcatcgagagcagtgtcgcagtccgccgtaggattcacaaagccacccatagcaagtctctttttggtctgtggtgacttcaactgcataaaccgcattactaacacctcgccgttcctctcaaagtgccccatactcataatacaatccagtaaagctggttcagaggggactgcaactcccggacgatggccatgttccgacctcgactaaaaaagccagatcccatccacccgataaatttgagttggtctcaaaaactcactctcgcagacttcgatggcttccggttgcagcccagctggcccgtccacccaaatggcacagcacgtgagccaaccccaccgcgatgaatctctcactctgcaattcgatccgtccgtggcagtcaagctgctggttttcgccggcggttagacaggttctaaccagtcgcggcgtttagagacgaagtttttatcacatcaagcatgtccgactcgcacgcgcactcgctactgcagctgcagcgccaccccaagtgctcggcgctctacgccactcgcctccgccgcaactcgcagcagccggtcgagccgctggctccgagcgtcgcctacttggccaacgtgacggtcgaggtgactaccaagacgctgggccgagacgccaccaccgtcgcactgacagttcacgaccacaagtccagttcaacctggcgccacctccgctcctacgccgaatgccgcgcctttcaggcccgagtcctgcaggtgctgagccgaggccacctctgcttcgctgagtgcccgtggctcttcgcctacgtgcagcgatcgctgccggcccagcgtcggggccaccacttgttccgcgtggccggtcattgccccaaacccggcgtggccgagaaccagcgccaagctctcaccagactcttcgcaacgctgcagcgtgtgctgcttaacccgctgaaccagaaatgctcggtgctcatgaaacaagtggcaccggaagtaatcacattcatcacgaaccgaagtgaagaggtcggtacggagtccctaaactcgccgacaaacgaccggccactggcgaaaacgttctccgagtcgttcatgttcgagatcaacgaggatggcgaggtgctggccgttgacgctgacgctgacgctacgtacggacaggtcagcaccatcaccacggcaagtctggacgatttggagcgagagtcggccgcagaagaagaagtggacgccactgcgacaatggagaaagttgtcgccggccaacgcgtgtgctgcgccatgtgcgcgctgcatcgaagtcggtcggacgagcaggtgttcgcgggctggcgggccgagactatgagcagtcggtttatgagactgcgggttggcgccggcgccgagcgcgtttccattgtggccaagcggcaacagccagcgcaaccagtggagccgcaggtgaagggcgtgtgggaatcccccgctttgtcgcaacgggtgacgtcaccactagaatcgttggcagttctaggtggtcgtgcgttggacgtcgtcgtcgtggaacatgacggaaccccgaaggacccctttccgagctccccgggcacgccaggcaccccgcccagagattcgcccgtgtcttctagaacctcgtcggtgtgtcagatcgacttgaccatgcttgacacgtggaacttgtcagggccggcgccggcaccgtcaccgaagacaccgaagaccgcgtcaccgtccaacctcgagaacattcgtcggatgccacgtcggtcgctcgtcgtgctcaactcgctgcgcagcaaattctcgctgcgtaaaaactgcatgggcgtcgctatttaagagaaccaagaccgttgagaacaagtacatgtagatggtcgcacaatgctaaagaaaatatcaactcggcgtggacaacgccgcctaatgaaggacacactgtagctttcggtttttgtggacattggaattcgagattgatctaaggaagaagagatcagtacgcgcccgaacctcaaagacagactgcttcaggtaggtagcgctttgcaaaacacgcttcgaccgagcgaatacgtcgcctcgcagatgctgccgcttcttccaggttcgtacagcaagtactcaacccggaagttgactcaacggcataaccacgagcgtccgacccaacgcctgggcggatagacgggtacttggagtcatttcgacgtacgtcgtacaggacgatacaaacgtttgcgacgagtcatttgtcattcgtgtcttgctgacagcaagtggcagcttcaactcgaatgcttcattgctgaattttggatggccgaggccaggcgcctttcccaggtgcaagcaacagcgttgatgttgtgatgttgtggacacccgacgaggtagggcttacttaaccattctcttcgtattctgtgcgctttattctaacttctccttcatcttgatctaccaggacactcagctccgggaagcggtccgacaacacggagctcgacgctgggacttcatcgcctccgccgtcccgaatcgctcggaggaatcgtgttctgctcgctgggaggaactgcagagtcgatggtcgctaacgcggcagccttggaccgagcacgaggacgagctgctgagcgctattgttgacagcgaaggcgcgagtcaatggaccatagtggcgtcgtttctgcctggacggaatgccaagcagtgccgcgagcggtggcaccaccagctgaacccggcgatcaagcgcgaggcctggtcggctgacgaagacgcgctgctggtgacgctgcagcgcaagctgggcaacgcgtggtcgcggatggcggcgtatctgcctggccgcacggacaacgccatcaagaaccgctggcactcggctcggttcagagcgcgggtgcagcacgccagattccagaatctcatgacggagagccaagctgccggtagctccatgatgctggcgggtgttgaaccgggggctctgtcgctctctccgttggattcgagcgtgggcgacgacctggaagggatgtgggcggacgtggctgcttgtcttcttgaggatccgtacgacggcgatggccacgacggagactaagttactaacgggaagttaatttcatgaactgcggggctgtagatatctagtgatccagtagcgctgtccattatcttgtaagcgtcactcatctttggtgggactggtacgtgaaggaaaatatgagacttggcgcctaaatgttcctaggaagaggggatcgaacccccgaccactgggactggaatccagcgctctgttttccaccgatcgaagatgccgacctggtctcactgcgttttgctccttttcgtctcgttcgtcgctgtaatgtagggaccaggcacggggggaaaggtaggcgatggagacgcgccagcaatttgtacacggagcaggccctccgaactagaggattgggctggtagtgcgcctgaatatgcaatttcgtcgaagcaaaccaaaattgttcggttaaatgaacagaaacttgccaacatttgatacgcatctgctgcggctgcttcgcagccgcagcatctgcggcgccagtgctattcacggcgcgccccggaagtgatgcagatgtgcagagcgatgtagtgcagcgggttgttcttaaacagcgcgtggagctgctcctccgtgatctcctcgccgaactcgagcgccacgtgcaggtgagccatacggccctccgtcttctccacgagactggaagccgacacctgccatgagcgtacgtacgatcaatagtaaaaatgcatgacggtttacagattcatgctatttcttcgcgtattctcaatatattttcgcattgaatgatgtagactagatattgatcgaccatcagcacaaccattcagccaacgttgccacaaaattaatttctccgagtaatcctaagaaaagttgtatgtaaatttccgcaattttgcgctgggaagagaactcggagcttgcaaaaacttccgcagtgaaagacgcagcggctgaaaacccgtcgcctcgcccaagcttttgtctgatctctgcagcgacatcctcgtcacgcgcaagataatttacccgagttgacttggtggataaaagctctgaccgagaagaggcaaagccgttgagaccctctctcatacccccccccccaacacaccaccatcttcgaatgacgagacttgccgatcatttctgcttaggcgaccaaggccacagatgaaagcgcctgcactagcacgatggaccgcagccgaagtaggtaagactcgtaggcgccagctaggacttccaaacgatcaagacatcacttgtttgttctcttttgtgtgtgtttaggacgagttgcttcgtgaagctgttcgacagcacggagtacggcgctgggagttcgtggcctcggcggtgccgaaccgctcagaggagtcttgttcagcccgctgggaggagctgcagagtcttggagtgtctctgacccgccaaccgtggacggcccaagaggacgggttcctcagcacgttcgtctactgcgaaggagcgggccactggacgatggtggcgtcatttctgcccggccgcaccgccaagcagtgccgcgagcggtggcacaatcagctggacccggcgatcaagcgcgaggcctggtcggctgacgaagacgcgctgctggtgacgctgcagcgcaagctgggcaacgcgtggtcgcggatggcggcgtatctgcctggccgcacggacaacgccatcaagaaccgctggcactcggctcggttcagagcgcgggtgcagcacgccggattccagaatctcatgacggagagccaagctgccggtagctccatgatgctggcgggtgttgaaccgggggctctgtcgctctctccgttggattcgagcgtgggcgacgacctggaagggatgtgggcggacgtggctgcttgtcttcttgacgaggatccgtacgacggcgatggccacgacggagactaagttactaacgggaagttaatttcatgaactgcggggctgtagatatctagtgatccagtagcgctgtccattatcttgtaagcgtcactcatctttggtgggactggtacgtgaaggaaaatatgagacttggcgcctaaatgttcctaggaagaggggatcgaacccccgaccgctgggactggaatccagcgctctgttttccaccgatcgaagatgccgacctggtctcactgcgttttgctccttttcgtctcattcgtcgctgtaatgtagggaccaggcacggggggaaaggtaggtagacaggcccccatgcttagtcttgctacgtcttcagcgccttcgcattccctgagaagagtttgccggagcccgttgatctcgtggagaacggagccaccgacaccattcgggtcgaccccgaggacttcttgggaaatcggctcttcactacgttcttcgctctttcactcagagacgtctccgcccccgctgccgtgttgctgctgctgccactgccattcttctggtgtcggttctgtcggctcgccaccttcttgatgttaaatttcgtcacgtgagccactaacatgattttgttttcctgcggagaaaaagtctggcgcttgcgagcgtagcagaagtagaagaccgtgaagagaatcacgacgatcgtgaagcccatggcgtcaatgcccccgtcgtcgtggatcgtcagtagcgagacggccatgaggatccacaccagcaaggagcagaaggctccggcgatcccgaacggactgcggaactcggagcttttgatgtttttgtagttccgcttgagcgcgatgtagccgacgcattgtccagagtacgacatggcagcggagagcatgcagactcctgtgaaactctcaccgacttgaggtacgacgtagacgagaaggcagagcgcgtagctccacgcggatccgaggagcagcgcgttgtacggtgtgttgcttttagcggtggttttggcgcagaagggaagcagaagcttcgatgttgacattgctgcgatgactttgccgtacacccacgtaaacccgaacgctgtggcgaagattgccggtagcgagaggaacgcagtgtatcgcctcgacacgttgaacatctgcgtgaacccgaggtcgaacgggatcaagttgctcggcaactctgtcaaccccggagtcagcgataccgtcacaaagaccaccatgactccagtcgcgaataccgacaagatgcacgtgagctgcgcgactgggatgactttcttcggtgcgtcaatttggtcaccagccagactcaaggcctcgatcccgacgaagaaccacgcggcgtgaggcaatcccagcatgaagcctctccatccgtcgacgaattccagctccgggaccgccgcgtacttctcaaagctcagaagagcagagactcggtcgcctttgatggtaacagccaacgaaaccacgtagaacagcgcccatatcaagggttggtacgagtcaaggctaggggctgcttctaccaccaagtcggcgaacgcgatcacggaggcggacacgtacatcgtattgacccccgaggatgatggtgatcccgagcaagtacgcgtccagtttgccgggcttgtaccgctgcgtggcgttcccgaccgccggccctgctgctgcattggctttgctgccagagttgggtagatgaccacgacttggtgagaccatgacactgtgcagtcccatttcgacgaaggaacttggagagccgagaaggtaaagtgttcgtttctggactggttcgtcggaggacgcttggttttcaccgtttcttagtgcgaatccggtgaagtggcaaggggttcgttgtgtactgatgatgatgatctgtatttggatgctggaacaccctggtacgaatttccgagattcgtataaaaaatctacgacttctattcattctacgtctttcgtggctttggattcactaacaagaattttcccgaccctgacgacctcgtggacagcggagccaccgacaccatcctggtcgacctcgaagacttcttggagaaggagaaccggcccttgaccaggctcttggccctctcccccagcgatgtctcggtagcgttgcccgtgtggctactgctcccgctgctctgcttgtggtgtcggtgctgccggttggccgccaccttcttgatgttgaatttcgtcacgtgagccactaacatgatcttgttttcctgcggagaaaaagtctggcgcttgcgagcgtaacagaagtagaaagaccgtgaagaggatcacgacgatcgtgaagcccatggcgtcaatgcccccgtcgtcatggactgtcagtagcgagatggccatgaggatccacaccagcaaggagcagaaggctccggcgatcccgaacggactgcggaactcggagcttttgatgtttttgtagttccgcttgagcgcgatgtagccgacgcattgtccagagtacgacatggcagcggagagcatgcagactcctgtgaaactctcaccgacttgaggtacgacgtagacgagaaggcagagcgcgtagctccacgcggatccgaagagcaacgcgttgtacggagtattacttctagcggtagttttggcgcagaacgggagtaaaagcctggacgtcgacattgcggcgatgagtttgccatacgcccacatgaagccgaacgcagtagcgaaggctgcagggagtgataggaacgctgcgtagtggtaggggatcttgaacatcaacgaaaagccaaggtcgaagagaactttagtgtttgccactacagccagacccggaggaagcgacaccgtgacgaacagaaccataactccaatcacaaaagcggtggcgatgcagaacaattggaccacggggatgatcttctttggtgtatccgtttggtcacagtccagactcaacgcctcaattccgacgaacaaccacgccgcatgcgggagacccaacataaatccccgaaaccctgcaacaaacttcatctctgggtccgtagcgtacagtttgaagctgacgtacgggagcgagccgaagcagtagatcgcaaggaacaacagagtcaaacccccgagcgtaaagttgacaacccagaaggctcgaccgcctctgatcacgatggcgagcgccacaacgtagaatagcccccacaccaaaggctggtacggtttcagtcctggcactgcctccagtaccagctccgtgagtgaaatgaccgaggcggaagtgtagacgatgtattcggtcgtatcgcagcacccgatcatgaacgcggggtagaatccgagcgtgcaacgcgccaacccgtaggcaccaccggagaatggcaacgcgccgttgatctcagccgtgcagcagcagagcaacaagtagccgatagcgatgagaaagtaggcgatgatgaagctgtagagccccgagtggaggccctcgttccagtcagcgtactgtccgcccatgacgatggtgatgccgagcatgaacaggttcagtttccctggtttgtacctcactggcgcaatctcagcccctggaccaacggtggtggcattaggtggtcgggagtccggagagctgcttgggggtgccgctggcagaactttggtggctgagaccacgttgatttcaactcgaagcttgtgtagcacattttcatcgggaatcatgccagtattcgactaaacaaatccaggatcaatatatgcaaggtttataataaaatatcgatatttataatatcaaaactatgaaaaaatcgcgatttgaaggcgtttcctcgaaaataaacctttgaccggatccgttcttgggatgaagttgctaggtctattctcaacaaccggatgctccatcccatgtcttaactagttagcatcaaattattattttagtaagcgccactaaaatactctgttcaccctaggatttcgtcaagcccgtagacgggtgccgttgtttcggcgccagtgagtcagccagctcagaattagttcgtcttcagccagtccagttcaagtcccagagtcggcgtaacatgtggcagcatcgtgcctgagggtgaaaataacaacaagaaaatatcagaaaagcttgcataagacagtattttctcagagaactgcacaataccgtagtgcacgagcgtgagatgcaaaatatacagcgtccagatgaacatatagccctggaccgttccgctttgtgtctctaacacgaaggcaaggtgatggagtggggaatagcccagcttgcgccgcatcaggacaatcaggactccaaatccgaccaattcgacagccgcgaagtgtaaaatactcgccagcgtcgttcgtagctttgctgtcgtcaatgaagcagtgtttggataaaattctgccacgggaagatgaaagagtgtcgacaaataaatcgcatacgagatgggcaagaccacctcgatgtactcggccagcaggacgtattccgagtggaaaagcgtctgcagtccgtcccaaaccgcttcttcgtcggatttagggacggcatgagaatttatcttgctagacgcttgaagcaccagccgtaacattgatccgttcccagattttctcgcccccttccggatgcttgtcactggaaggatttggtgctgcttgtgatcttcgcactctgaatttcgtggtgacccctgaagttgtcaatgcaccgatcgtttggcctcgttctgtgtttatcagctcgctgatgaattccttgctgttgtgtgaaagggagagaggaaacggtacgaacactcgaatcggacgctttcgggaggtcgaaacctggtcattcttgaaaatattcctcaccaaaaccggcatatcttcgagataggatgtcgactgcaaaatttctgacgccgatgactcccgagtggcgtggaccccgtccgctcggatgaaaattgcgcgaagagcgacaacaacgtggaaaccatcgaacacgatgaacacgagcgacgtgacccacgaggtcgccgactgcatgcagatggcgggttagtagccgttaaacaggtctacggacagcaccacaatggggccaatgtactcgtggaggtctgcagccgcagtcgctatcacttgcttggtagtaaacttgatgatgggcatcacaaacacgaacgcagcttgcttcgtccccgataaatgggtgaataccgcgctgaagacgggacacgccacggccacgaaaccttgcgtgcaatttattagcaggtgagtcttgatgttttggcgaagaacggatgacttggatagagtccgacggccgattgtcaagccagtaaagaaccagaagagcgagacgaaaggagccactagcagcacgtagccgaacggaattggaaatctccatgttgcggctaaaaggatgggtaaaacgacgcacgaaatggccgtcgctagtgcaatactgagcgctctgcaggtggagatcaagtttcctggtatcgtttgtttcaagtgagctgccagcctcagtgcaatcccaaacagggcgaggaaccatcgcacccacatgtgattgttctctctccagtcagttgacggggttcgtagcgggatgcagtcgatggcgagcgtcacggccaattctgggagcgacgacagcagacacacagcagtcgctcggcagtttgatgtgcgctcgtggtagtctcgaaacgcgagcaatcgctcgatggagtagtgacttcggtggccgatgtggcactggtgccacgaccgcgtgactctctgcatggctctcgagaggaaggaggtgaattgtcggtagcgcgtcttgaagctaggagtcgctggtgcgactacgaaatggtttaccatgagcgattgttttgcccacgggccacgacagcgtttgtatgtttgtttgttcgtggcaaagcactgttgtctctgccccctcacactatatttacgcaggctcggtcgttccgaaggagggataagcatacttagctcgtactaggtagctgaacaccaaaatcggtgaaagacggtatttgtgtttacagaattccacgaacgatgaagacgcattagcttgacaataatgtaagaacaagttagacgtgtaagtatcaacggcgtacgactcgtagctaagttagcggaaagagctcttctttgccgaagaaacgtgcacaacccgcttggacctctcagggtgcgaagtctcagtgcgtgtccgccggctcgttgtaaacagatgcacgtggctggttcgcttttgccgacttgctgccagcttcttgatgttgaacttggtcacgtgcgcgatgagcatgaccttgttctcctgggcccagaacgtctgctgcttccgcgcgcaaccgaagtagtacgtcgacaaggccagcaccattagcaggaacgcgatgagcgccaccccgttgtcatcttggaacccgatcagagcgatagcagtgaaaatccacaccaacatggagtagacggcgcctccaaccccgaaaggacttgagaacgacgagctcttgatgtttttgtagttgcgtttgagcgagatgtagccgacgcattggcccgtgtacgacacagacgcagataaaatgcaaactcggaaaagctcggctgttagtactgggaaaatgtacatgatgatgcagaagccgtagctgcagaccgatccgagcagcagcgctgcgtagggcatttcattcggctttgtgctgtacgcgaagaccggaagcaggaggcgggacgccgacatggcgtagatgagcttcccgtagcaccacatgaagccgaaagccgaggcgaaagtcgctggcattgagaaaacgcttgtgagttggtgcgaagtgttgaagaggagctggaagcctctgcagaatgggaaagcctcagcagtaagtgaaccgactccaggtggcagcgagatcgtcacgaagaagaccattaaccccgtcgccaccagcgtcgcaatacaggacgcttgagctgtagggatgatcttcttggggttttcaatattgtcgctagctagcgtcagagattcgacgccaatgaagaactaggctgtcaatggaagcacgttcatgaagcttttgaagtctccgacacctgcaacgtccgagtctgcagcgtatttcgcgaactttacgtacggaagggacccaatgcaaaacaccagcagcacgaccagagacgcaactccgagccagcggttcacgatccaaaacgcgcggtcgcccttgatattgagcgctaacgcggccaagtagaagatggcccaaaacgccggtcgatagtccagaatcgctgggatcacctcggccaagaggtccgtgaaggacaacacccccgccgacacatacgcggtgtattccagtgcgtcgcagcacccgatcatgaaggcagggtagaagcctagagtacatcgctccagaccgtacgcgccgcctgcgaagggcagcgcacctttgatctcgcccagacagctacacagcgtgatgtagccgcttgcgagtagcagataagcgatgaggaacgagtaaatgccagcggagacaccgctgttccagccaaagtactggccgccgatcccaatgctgatgccgagcaggtaaatgtcctgtttgccaggatgatactttgtcggcaggtgcgggtcgacagggcctgacgtcgcctaggctactctagagccctcggtagcactgggcaggttttcgcttcgaggcgcgaggcttggaagtacttttcgcggcaaaggaaggatgttgcacatgcacgaagccatgtgcgttgagatgcggccgctgtcgctcaatttcgtctgagctttcaggtagtttggaggataacaccagcaagttcacacgaacgaaacgggtccataggggtgctttccactatggacgaagtatttctggggctgctcgaatgagaacaacggcaccaggctattcattatctttggaaacgacgaacacttcaggcttttgtatagtagagtggtgttgattttttttaaatgctaatattcataacaaaggcgcatgaattcactccattatacacttttcacttcataccctacaattcaatatcctgactgagatgtattcgtgagctatttgccgtggctgggggtagagttcacggcgaatttggaggtgatcactccccacttgccattgttttcggtatgcgacgtatctgttccacccgtgcgtttgctattgctactgggctttttggcgccgcgcttatgtctgcccgccgccaccttcttcacgttaaacttcgtcacgtgagctacgagcatcacccggttctccgccgctgagaacgtctggcgcgtgcgagagtatccgaagtagaacagcgtcagcagcgtcacagtcacgccaaacgcgatgatctccactccgtcgttgtcctggaacgctacgactgcgatcgtcgctagaatccagatggtcatcgagtatacggcacctgcgacgccgaacggactctgaaactcggagctcttgatgttcttgtagttgcgcttgagcgagatgtagccgatgcactgacccgtgtacgacatgaacgccgacaggatgcagatgcggaacaggttcttccctacggcgggcacgaaatacgagacgatgcacaacccgtagctgacggctgatcccgcgatgagggcgccgtacgggctctcgtgctctttggtggttttggagaggaacttaggcagcaagcgagacattgccatggcggcgatgagtttgccgtagcaccacatgaacccaaacgcggtagcgtacgttgccggaagcgacaggatcgtggcgacgtggtggggaatattaaacatgagcgtgaatcctcggttgaacgggaccaactcggttggcagcgaggctaaaccgggcggcagtgatgcagttacgaagtaaacgaagagacttatggcgaacagtgtcaggacacaggagacctgagctatagggacgattttcttgggttgatccacttgatcgctggataagctgagcgcttcaacgccgacaaagaaccaacctgccagtggtaaagctttcatgaatccgtggaatccatcgacaaattcctcttccccatactcagggaagtctacaaacgccaaagatccgaagcagtatatcacgacaatgataagcgagatgatgccgatgccgagattgaacagccagaagacccggccgcctttgatctgaatgaagagcgcgctcacgtagaagagggcccacagcaatggtgcaaaagcgtccacggagggaacaacatccacgatgagatcgacgaaagatatcactgacgccgacacgtaagcaatatactcgagagcttcgcagcagccgaccatgaacgccgcgtagaaccccaaagtgcagcgagctaggccgtaagaccccccagcaaacggtagcgctcccgtgatctccgctgtgcagcagcacagtgtaatatacgccgacgtgatgagaaggtaccccaggaggaagctgtagattccagcgttcaccccttcattccagcagaaatagtggccaccgatgacgatcgtgatcccgagcatgaagatatcactccggccaggtcgatacggcgctgtcgcggaggtggcggatggccccgaggctggttcggcatctcgagcgtccgttggtttctctcgaatcggttggatttgaatcttcggcgccgacagcgcctgcactcgcgtcgttcgttggaatggattgtggaatttgatcgctgtcatggctctgcgcgtgtcgaggcttgaacgtgaagtgctcgcaaagtcagctatcgatttgacttccgctacctatttcagagcccagcgaagctgatgaaacccccacgagcgaatcaacacagggataagactcaagagagtcgaagcggagcaacagacgatagagctacttctttgatcacgaagacctcgactggagtagccggaacctcagtctttttaaacagggaataccatggcgtgagttgtctcgtatcttcgtattcaaaacttgttaaagcctatcgagccgtactcgtcaccgaatgcatcgccgacttggccgatttgagggtcagcctccctctctcggtttgagacgtttcagttccgcctccggtgcgtttgctattgctactagacttcttcacaccccgcttgttcctgcccgcggccaccttcttcacgttaaacttcgtcacgtgagctacgagcatcacccggttctccgccgctgagaacgtctggcgcgtgcgagagtatccgaagtagaacagcgtcagcagcgtcacagtcacgccaaacgcgatgatctccactccgtcgttgtcctggaacgctacgactgcgatcgtcgctagaatccagatggtcatcgagtatacggcacctgcgacgccgaacggactctgaaactcggagctcttgatgttcttgtagttgcgcttgagcgagatgtagccgatgcactgacccgtgtacgacatgaacgccgacaggatgcagatgcggaacaggttcttccctacggcgggcacgaaatacgagacgatgcacaacccgtagctgacggctgatcccgcgatgagggcgccgtacgggctctcgtgctctttggtggttttggagaggaacttaggcagcaagcgagacattgccatggcggcgatgagtttgccgtagcaccacatgaacccaaacgcggtagcgtacgttgccggaagcgacaggatagtagcgacgtggtgggggatgttgaacatgagcgtgaatcctcggttgaacgggaccaactcggttggcagcgaggctaaacccggcgggagggaagccgtcacgaaatacacaaccaatccagtgatggaaagcgtcacgacgcacgaaacttgcgcaagtggaactattttctttggctggtccacttgatcgctcgataagctgagagcttcaacgccgacgaaaaaccaagacgccaaagggagggctttcatgaacccgctaaatccatcgacaaatttcaggttggggtctgcaccgtattccgcgaaatcgacgaacgccaaagatccgaggcagtaaattatcacaataagcagcgagatgattccaatgccgagattgaacacccaaaacacgtgaccgcctttgatctggatgaggagtgagctgacgtagaatagcgcccacaacagcggcgagtatgcgtctagcgatggcgcagcgtccacaatgaggtcaacaaacgatatcacggacgctgagacgtacgcgatgtactcgagcgcctcgcagcaaccaaccataaacgccgggtagaaccccagcgtgcaccgtgctaagccgtaggaaccgcccgcaaacggcagtgcgcccgtgatttccgccgtacagctgcacagcgtgatgtacgcggtggcaataaggaaatatccgatgaggaagctgtagatcccagcgttgatgccttcgttccagcagaaatactgcccgccgatgacaatcgtgatgccgagcaggaagatgtccagcttgccgtgtcggtatttgatcgtgttgtcggccgatggtccgttcgctggggctgcagctttctctccgctaggcaaaatctgaaccgtggacggcgccaaaggctgaactaaggtccgtctcctgaacggatgcaggttggggattttcatggcaatcacagcgtgctgctggtgccttctcttgcgaaatgggtttgccccggggctttcggaggctgctatttattccaatggctcagaaaaagcttcgaaacgcccgaggacgagaacaaccaaagtgcattctcgtttacgctgtcccgttctcaacctatgcatagctcagtgtctctgggtgaaattatgtactgtgtcgcctctatcatcgattggattgagttgattctcgttcacacttcagcttttgtatctatcgtcctgcacttcttccgctcctgccacttctaaccgacctaatcgatttcccaaatgttgcctttgggttcgagcgtcttccttccgaggcttcgcttcctgtggtgtggtggctgccgcttgtggagcctgtggtctggtgtttgtggcgtcgagctgccgccaccttcttgatgttgaatttggtcacgtgggccacgagcatgactcggttctcctgcggagagaaggtttgacgtttccgtgcgtagacgaagtagaacaccgtcagagacgcaactaccgccaggaaggcaaagctctcgacgctcccattgccctggaaggcgacgatcccaaccgtactcagcagccagacgcacatggagtagaatgccccccaggacccgaacggacttcgaaactccgagctcttgatgttgcggtagttgtgtttgagcgaaatgtagccgacgcattgccccgtgtacgacatgaaggctgccagcatgcagatgttgaagaggtactggccgatggacgggacccagtaaactacgaggcaaatcgcgtagctgactgaggtccctgcaatgagcgcagcgtagggcgtctcatgggccacagttgtcttgctcaggaacgacggtaggagcttcgacgtcgccatcgccacgatgagtttgccgtagcaccacatgaagccaaacgcggtcgcgtacgttgccggcagcgatagaaccgtcgcagcatgtcgaggaatactgagcatcaatgtgaaccccttgtcgaacggcaccagctctgctgggagtgctgcgagtccaggagggagggaagcggtgacgaaatagacgaagattccagtcacgaagagcgtcactacgcagccgacttgggcaatagggacgatgtgcttggcgtgctcgatctggtcgctggccatgggtagagcctctaccccaacgaagaaccacgcagccagaggtagagccttcatgaatcctgagaatccgtccacgaattgcaagtcagggtcgtgcgcgtacttggaaaagctgacgaacgggagcgagccgatgcagtagagcgccacgatgaacagcgacacgactccgagtacgaggttgaacacccaaaaggcccgcccccctttgatgtggaatacgagcgcgctcaggtagaacaacccccacagcaacggacggtaggacttgagctcaagcacagtgtccacgaggagatcgatgaacgcgatggttgacactgagacgtaggccatgtactcgagagcttcgcagcagccgatcataaaggccggataaaatccaagagtacagcgcgcgaggccgtaagctccgcctgcaaagggtagagctccagtgatctcagccgtgcagcagcacagcgcaatgtacgcagttccaatgagaagataagcgatgaagtagctgtagagacccgcagcgatgccagcgttccaacagaagtactgccctccaatgacaatggtgaggcccagcacgtagacgtcccatttgccaggcttgtacgttggtgcggtgctcccgtcgcttggtccggcgactgctgttaccactcgagttgtggcctgctttaggagtgtagacgcctctggagctgaccatgctggatgcgactgcactcgcaccgaccgtatcgagtgggatgttggggctatggaaaccttgaaagtcattcgcaccagtggcccccgggtgaagtcaatcggtcggcttcggtaaggaattctgtcgccgggtgcaagaatggaaaatgaggaaatggataaggtctctcctccttctcgcacaggtccaaaatagtcgtgcaatttgatgcggctctggttcgcagcactatattaggtgcgtacctccgcttcaaccagttcaagtgccagctacgggtaacttccagcgcgtaactctatgctgcgtcggttgcaacgcatgttgtgaaccattcgacttggtgcgatccatgacaatggttcacaagtgaaaacaaccacctaactaaagtataagtttaatagatgcaagaacttctccagagtggggtctggtaggtggggggggggggcacagtacgcccatgaaaacactcgatgagaggggcacagccatccagggcgagcgcatcgctccggccgtggagggctggcaaaattctatgatattaaactatgtaaggtgatcgatcgagtctacagggactccatgtacttcttctgcagctcgaaggcgaccaatgtgatgccgaagagcggcgcttgcaccatcatgcgaggtcctgcgcccttcatcagcgccttagggccgttggccgcaaccaccttccgcacgcagtccatcatgcccgtgtacggggaccccttcatctgcagccgcgtcttgatcacgtcggccggtgtgcagatggcggccgctccagcgccggccacagctcccgccgccacaatggacagcaccgagttcttgcccgtgtccttgtcagcccaggcgtcccgcagcgtggcgtaggacgggaagaacaggatagcgtacggtacgtcgcgcatgaagcacacgcccgcgcccttgtacatgccgcggatgcccatactgctggcgatctccatggccgtctgtcgctccgccacgggcagtgacgtctgcatctgcagtcggatcttgacgatctcaacctggaaaagcatcaaaaagaccaaagtctccgttagttaacctgacacccaggattccagatacaggctacgcttaagagctcttaccgggttggtgatgatagactgcgcgcatccagcgccggctccagccagcgcctgcttggccattgacaggttaccgtcggcgtcggcgaagtgctcgcggagctgctcgttgaccgccagcttgatggccttctcgggcagcacccccatgagcgtaggcggcagaccgcggtacagtccgcgcagtccgtcggtggccacgatgtgcttgaagcactgcagcgggcccgagaacatcatgcggccgcccgtgcgcgtctggccctgcaggtgcgtcttgacgatgtccatggggaaggtcgtgaccatcccgacggcgcccgccatgccgcccaccgcgagcttgaggtgcagcgggatggcggtcggcgtcttgagcgtcttgggggcgctgctggcagcctcacgggagcccagcgagcgcaccttgagcggcgggatgtggcggagcgcggcggacgaggtcatgctggactggactcggtcgttcacgaaagacggcggcggggtacacgtggagctgcgaggccggaaaaacgggaatgaagcggtgccaattgctcttctcggggcatggtcaagaacagatcgagcggcgggcggcgggtgctgtgctgggatgcacacgacgactgccggcacgacggtgctgccaacgtaagcttcaactggtggtgggctcgagatagccagccgtttttctgcttggggtttcggctttttctgctgaaaattcgtgacgtcgccccgtgacgtcgtccttttgacgtgctagattcataaattgaattttgcattgaatttttagcttgtatttgtttttatatttactgatatgaccatatttgtgagatatagtagcatatctagccacgaaaactgtaaagcaggaaattaactgcagtattgaccatgagacagacccagctttggggacagtcttggggacactttgtcgcactcgacaaactgtgcttatcggagaccaaacgcacagtttaaagggaacgaggcatatctccgtagcaccggctgcgtgttggtggggaccccttttcgcacgctttggtgcacagagagagcagtctcgcagatgactgctgcagcagctcagttgtgccaggctttgcagcacaccgagcggcgtgtgcgcggtggatcgctggtatcgaactccagaggacgcagagcttagacgcaaggtcaagctgcaagattcgcacgagggaagaaggatcaagcgggagaaagcttgaaagttttgagggttcaggccagcacggggccttcaggttcatgaggccaaccgagggcggaggcagcccgaaagaatattctactggcgattacccgtgctgcacatgcgcttacgctgcttgggtgccgagtcaaggtgtgccagagacgccgcccaggttgaagtgcacggcaatttcagtttttgcacggcatttacatggaaacgcgctgtcaaacggaacacttggtctcagtatgcggtctgttctgtaaatactatcgtttaatcaaggtgtggacgaaaacagagcttgtggtggtggtggtgcacagccaagctttcgacattgctccagtcatgggagtcctcttcaggcgctggattcagactgctttcgattcagaatctgttgccagctgcttgactccgacgcgcagacccaggggtcgccgtacacgccttcatgcgttgggcctcagctctgttggcggtacgagtgaagctgaatgataaaacgctcaccgtgctatcgctcgtagttacacagctgcccaaggcatgctgctgaatctatctctgaatcgctccagtgcacgccaggaaaagacaatgccggttttcactttccttgctacagaatgcttgccaaacttgctacgatatttttttctcttgctacactgaaaacggcttcaccccggatgaagtaaggtgggagcggcagcacacactacgacgcgcaagtcgcgcatgattttccgtgagagcgtcagttagtgcagtggagggctaccggatgcaagtatcttctgaagaagaagaacgcgagttgataggacgacttgtcgtgctgctggctaaccgaagcctaaaaccaatctaatgccgaggtatccgttcagaaattgccgcaagttgagcgttgtcgtcaacagctaaaaaacagagaacagtaggttagggaagcggcggcgcaaagttgtctttacattgtcactatcgagattaaataaactcggttgatcgagaagtgctggtaatgttaccgaaactagcagctcaaatggggatgatcaatcgcttatcacgcagacaccgtggaaacggatatcgctctgggtacgccttggcgcgtgaaatacaaccgctcgtcataccatgagaaaaatctcacaataacgggtgtcttcttgtaagtatggagagtttcgcgtgcgaaacgagttagaaacctcatcaaacaggaaaaaagagaaacaaacattcggtcctcgtgcgtgatactcgccacgtcgagctcagggatcaagaaggaataggatagtgctggtatgaggcagaaccactgctcctctatctcccaaccaacaacttgtctctgcgattgtgtagatccaagatctccatgtacgtttttgttataccaaacgatgaattcgtacagctcctagcctctgtcgctgcacttgaagcctatcaagattgagtgagcgtactacttgaagtatcatgaacaagtctgacactttttttttactttttattcacatgacatcgcccggtagcacgccaacatagatgatgaaagagcagcgcattttccgacgaagattctttagtactcttataagtttggatctgcatttgaggcacccgatcgaatggaagagaatttgtaggcccccacgtgtgcactgcctgaaaataaatacttcgtaaaagaaagctgttagcatgccatcagctacatgtacacgcagtggtgcttggtggaaatatattctacgatctctttataagcattagcagtccgagacgcgtgattcttgagagtttttcaggcggtagacgttatcccatagtcttcgtcgaacacgactgagagtagaacagctagagctccatgaccccgaaaagctcatcgcgtacagccatccttcgtcgtctcctctcgtgatggagaattgccagcctgaccccgtcatcccagccggagctgctgggacgacgtccttaaattgattcgaggtgattgagttgtcgaacgacgaccactgcagccgagccgtagctgtggaaggcttccaaccggagcggaaggacttggactggttttcccacacgtgaagatgctgttcgacctcgtcatcgctcgtagccttcagacagatctccaacttcagcgttgactgccgattctgcttggaatatgcgttcgacaccgatatcgggtaattctccagtgttcgaacacccatgcggtcctcaaacatggccactggcaagacgattgtgcccagaaggtcgtcgctccttaagaagtccatatcgaagatcttaatggttaggacagcggtcatggggctctccacggggaaaatgtagcgctctggcgggttccattgcgggttgagattgctcttgtggcacagacttttgcgctccatgttgctgactttgaagactacgtaggggtcactcttgccaccgatgaggatggaatcgctcgccgggaggtcctccgcactgaacagcgtcacgtgcaagaacggcatagtacaggtcggtgcttgcacgcgaaatgtggtgtagcaacggaaaagttcggcagaggaatcggcgtgcaaggaacttgaacattgctcccatatgactgcaagcacattacttccgatcggcaatgcgttatgttctctagtgccttctacagtagctaaccggtcccgagaacttcagtactgtacaggtgggccggccctgttctgagtggggggagctgctactagagcagatgtgacgacgactatcagctacagaacgttggaggtgggagttcttgccgagtttaatagcgagccgctcccattaaaagcgactacctatcagccatgggctacaactacgccatgcccacatccaagaaactcacgctcgtgaacgtgtccgtgtacatcgtctcccgccgaattggctgtggaattgcatgccacgtgctcaaggtggagaacaccggcgtccttgctggattcagcttcgtgtgcagcagaggacgtcggtgagagctgggagcaacgattcatgagcttgatctcagcgcaggacacgatgaagagcgtcgtcctcacggatgcgtgggttgacggccgtcacttcagtcaacatgaggtcgagttgggcttcagtcgacaagaagtgggtccattggaggaccccgcccaaggaacggtgaccatcctgaagcgagtcgagctcaatttcaccagagccaacggatccatccgaatctatctgtccgtgtacattgctacgccgttcctccatgagctcaaggtgaacaacgacactgccgttggctttactttccaatgcaacagagggcgcgcccacctgaatcctggcgatagatggagccacagcttcgtcaacgggaagacggccgtcaaaaccatgaagagtcttgtggtcacggacgcctgggtgaacgaccgccgtctcacttaggacgacatcgagctgttctttgttaggcgggacgtgagcacgcctgcccgacttgaagcacgtgctcaaagggagacaccacgatacgatggagtcgtcgctgttgacttcggtacgcctgcgaaagtcccgatctttctgtccgtgtacatcgcgtcaccgcttcatcaggtgctcaaggtggtaaacaacgacacgcaggctggattcagcttctgctgcagtagaggacgcgccaagctgaatctcggagagagctggcagcatcctttcgttaacggttcgactgcagtaagcattctgaaaagcgtcgtgatcactgatgcctgggtgggcgcccgccaccttcaagaggatgagatcgagttgcggttcgtgcgacaggatgtgagtttaccggcgcgtgtgcaagcgtgcatgctaggcccagtctccaagagctcgctatttgtcacactcaatctacagaaggccgatcagcagacacgtcgctgtagggtaagctgaatctttcattggtagtcgtacttaccgccagtggacaattgatgggagaattaatcttcataatacgatacgttttgtgtttagaatgaaattcacagaagctacaagtaccataccgtcaaaattccaacggggttggactgcttccaaccaaaatcggtctagcaacggtattaggttttttgttcagctgatatttaacctcacggccgccgattggattctcggccaacagtccagaagcttccaggttagtgcagcgagtcgtgcaaagctgcttgtgctacctgtgctgactgtgctgctgttgtctctgcatgtacacaggcgctgctggccgctgggccgtctgtgctgctgggctgcgtgtgctgctgggccctgtgtgctgctgtgccgcgtgtgctgcagtgccgcctgtgctgctgggccctgtgtgctgctgggccgtgtgtgctgctgggccgtgtctgctgctgggccgtgtgtgctactgacgccgggccacttgctgctgggctatgtgcgctgctgggacgtgtattgggttgcgcttgtgcgctctcgtggcgtgtggctcaagtggccgagggtttggacgagtatggtgctgttgatggatgcgactaacccgcgcccatggagctcgtgaggttgagcgccaggccttcgggcctggaggatcgggtttaaaccccgacatgggcataaagtattatgtgtttttgctttctttttggacaggtcagctaagagagtgcgtgctactcctgttgtacgtattgtgtatcttattgactgtttagtgtgctgcgtgtgcatttaggtgaagcgcaggaatggcggaagggcggaattgggtgtcgggtcgacgccttcgccttcatagtagcgctcgcgaaactggtcaaggaggacggaaaggtggcctgctttgtgaagcacacgcatggctttgacgaccgagccaacggctacagcctgtgagccttgtgcagccaagtattcaagcgtcttcttctcggcttcgactccaacagcgtggacctccgccttgtacgctggcgaggccgggtccagcttgaacccagaaggtaagcagagcatcatgaatgcaactgcgcgtcgtgactcgtgaaggatggctttgctaactgttattgattcgtacatgcgtggtacagcagtgaaccactcgaaccacactgccgatagcgctttggaggcacgtttgcgcgcgcgctttggctgcgactgctcaacgtcttcgtgctgctgctcggtagtgtttgttttcttgtcaatagattctgcgttcgcccccaaaacagccagcctttcctctacgcgtgtttggcggagcaatagctcgtcgagctgctgcgacaccttttcgagaaacggaacatgttttgagaggactcggccactgtttcttgtttctcttctgcaggtggattgaatgcagctcggagggtgatcgaccatgccaacagctcggaggcctgtatgttgaggacaccaagggcttcatgaatgcgacggacgtacgggctatccaagcgatggcgttccatctcggggaagtgaaggatcaaggtcgccatcaacacttcgagcacctgaggatccaagttccaagacactgttgggaaaccagtgacagcagcgaagagaagatcctgcagcttctccacgcgcgctcggacaactccgtccagggcggtaaggtctggaagtcgggcgcccgcttgcgggttccaaccgctcaattggcgcgcaatttgttgatcttcgtgtgttgtgttcagcatgtaggaaaacgccttgctcacgcgcgacatattccagcccccgcgttcaacaacccagttcgggctaatgcggctgtcggcgttggcgtgcatggccccacctcttctgaaggagtgcgaggtaagtcccttcgtgagtccactctcctttgctgctggcagcccactaaccgtgactaatagtctattgatataagcttgggcaccaggggccaagttggctcgacatggctgtggagtcttgcatgtaggtgcttccgcaagctcgcggtctagctgcgcaatcagccccagctcgccatcgtcgtcttggtcgtcggacgcggacagcgcaggtacggcagcaaattgcgggaagatgcgagttcctggagcgggttgaagggcgagagcgacagctagcacgtgtaacgggcacgtgaagggattgttaggacccttaaacagggagattccctgttgcgaagcagtcttcacacgcttaaagcggagaaatatcatactgcctagcatatacgcacagaattttcagcataaatcgtggggttaatcaatacaaaaattcaaaatcctgcacgattcgtaccgcggtatacacacagctgggctttctccaattgctcagcctcagaaccacgaccgtagaggtaccacatcaacgccactagcaccgcatccaggtagtcggagttggcggaagcgtgcatgtagagagccgagatgatagtctttatatctttcttagtacatggtggcgcttgtttcgtgacaccttgctccggcctctattcacagtaccgatctagagttgatagcatcttttgcagcttcttagctacacattggccctgttgcgggtacagatccgccagccagttcttaacattgccaaaataagatagcacagtgttcttggacagagctactccatgccttcctacttttttcactaagaaccaccatacttatccagaatgacaaacaaacccttacatgtgctgtccttagaaatacgaacatgcacttctgtgagcgtcacctccttcttcgcaaggaagtcttcgaaggacttcacagccgtcgctctgcttctctggctgttcgcaggagctagcgatgccaccgacatgcctgtgtgcgtcggaacgcagaatggagtcggagatgagctggcaggcgttggaaacctatgaatatttattctatttgtagttcacttgatatttgtatggcataatcgatatcaaatcgcgtttccaaccagatatcgttggaatgctcagatcagcggttgacagtcattccctcgatttaattggtcgaaattttaagcaacggtagtgtctattggttataaatgctaagaatcgcagacgacacactcctattggccggaagcaccatacaaactttaagatatttttcaggggttagaattgcagcgatatgctaccatacctaagaagaaatgattccagtataggttaccccaactcttccgatacagccacgacatgagaatagagcgacttcaaagctttcgcggtctcagatgcgtcattgcggagtttgcgttcggcgtgctcagcagccttgtacagcttaccgcaattttccaccgctacgttcaacgctaaacaactcagcacaaacgccgccgcagcaacgccaaagtgaggaaaacgaggccgaaactaagccattcccccacgtaaaatacaacttcgcacgtcgttccagctactccagttaggtcgaagagatttgagaatacgctacggaaaacaaaactgctgaggtgcagcaacgagatcgctagttcaccgccgcgagcgactccagcgtagcactcgagcagaaatcctggaattgcgtccggaatccaggctaatgctcccgccaaatctttgagcaaaggcagtagaccctttggctgaggttgttctagccctttcgtgagcaatggagccttaacgtcgtagaagctggtagaatccatccacattcgtcacacggatgcctcgaattctccttagtgggcctttcaacggactgttggtggatgaatctttaatgagcgtatcaacttcggccttggcccgctttgcatctacgatctggttttcttgcgccagttccagcaacacacccaatactacgtcgacgacagagtcacgaccacgctggaccaactttagcgcaaattgaacaccacgaaaacactcgaggtctttcaagccttggtcaccagtatctaagcgctgccttgcaattctgtggcgtctttcggctgcgggtatgcacagaatttgtgcagccaattgagcgccatgcgcgagttgcctgtacactggaataaacccgactgcgcttgcaacaacggcggccgtgcttgtacccactgagatgacgctgtagatgaagatgctgctgtccgccgagcgcctccaagcacgaagggtattgttgagaccgctctcgattttcgctcgaccatcacgtagttcgttcgcacacttcgcaacttgttcatagagctcgccagcacttccgaaacggcactcgaggtccttcaaattgcagatcggtcggcaagaagcgatgacgacggtgggaaccgggggtttgagggtctttttcaccaatttgtcgccatcgctgtggggtttctttcggagaacgcttcgaaggaggttccgcatcgccttaagttgcctgactactcgaaacgacgaatgcagtggtatgagatcagatcagaacgacttggcacctcgaggacgagacccacttggaatcgttgattatgttggtagtggtgctgccctgtacttgtactcggtactgtatgcatgtagcctctccgagagttagaggaaggcggttattattgtgcttttcagttgttttggcaaatcggacgtgtaaaacagctacctactaagatggggctaggttatcggagcagattagcaggcccctcgtagagaattaggaccaagaattgctagtccgatggaagcacttgcgtaggtcctacaaacagccgaaagcccgaatgtcgcccattctcacggcattcggggtttgaggtcttaccaaggactcctgtcaagtcttgtggcaggactttcatacgagctgactctaatacggtgtatgtcagacgcagaataaacataggtaagcacgatgcggtcgatacattaaacaaccaagtcttctcccttcgccttcgtgggttccagcactgattgcttccccaaacaaagcttgcttggcttggacgtccattgaacggagagcctcggagaccgctcatcggactcgtccgagatttgcatctcagatttagagacccccaacctcagattaactgacctccataggactcggcaaaatgaccgaaaggcacaataattaaaggtcgcaaagtgataggactcctatcactaaaaaacattttggacggaattcactcctatcataggagcgtttacttgaattccgtccaaaacattttttgcgtcgattcgccaaatacaaaaaatcaagtcgattgtccaatcaccggctccgaattttctggcgaagtagctgatcatcgcccacgcctctgtctacggacggcatcaatgcgcagagttccgcctgtggactcttggacgtttctcgttgcgatgcaagtttttggccaggttcgcttcggcggtatttctgtcgggtgctgaagcattcctgctattgataggggtccgtcatgactcacgactcagccgactgaaagacctggctaaacaagtgcaaagggacatttagtcataactcgctactgacgctatggggtgcaaactcaagctgcttgtcgtcttcagcgccatctccaacgctattgaaacggcgagtggctactggagtcggatgcaggtcggccaccgtgagcgatactccgtcgagcggatgctggctctccgcgactattacgagcaagcgtcactgcttcgggtcctgttcgtgtgcctcgtcacgccgttgccggcgttcgcggccgtgattctgatcgagtgcatcccgttgcgttcccctggtgaggggtggcgcgccaactacgcgttctgggtccggctgttcctgtcgagcttccccatggcggtgggcggcgtgctgcaggtgaagcaggtgatcccgccggggatcatttcgtaccgagccacggttgctattgggttggggacggcggtgggttatgtgtcgtgtgcgcttggtctggcggcgttgtggacgttcccggtgccgttcggctacgcgttgatggtgggtccgttcgtgtgtttcttcatggcgagcgtttgtgttgtggttgggccgaagatgttgtcgaagtctttgcgccagcagatcatcccgccgttgtcggttctggcagctcaaggcatgctggcgggctgttatcctccgttctacgctgtctttcgccagctctcagggtttcagcagactacgtttgttactgttctgccggtcatcaaggtgttgagcaagcagtacatcgccaaagtttctgcgcatctgaaggagtgcatcggtccgaccatcatcttctccgtcgacgtctgcaatattctctacagcgtcatctgcatgcagaccgcggtctcgtccctcacgagcgtctttttaatcggctccgatgtgttcttcatcctgatggtgctgcgcagcatctaccggatcaaccctgctagtgtatggcctgaagacgcgctatcgagctcgatgcaaacaaggcgccagagctacctgcagtctctgcccgtgctagtgcgcaaaacgttcgagaacgttgacagtctcgacggtccaagccagcccgttcgtgtgtgcgcacctttcccgttgcctcttgcgggtgatagcaaggagctgatcgccgagctttgttgtgccacacccagaaagccgcaggcattcgctgctggtggtggcgctctacctcttcggcgcgcttcaagccttcccgatctttgttacaattcccttattggagattcgaggggcgacacacgtgaggtagaggcaacacaacgaggagcagtaagccaagacactctcaagacaaaatcgtcgtctgtggttaaggccgaggtcaaagtagcgtcacggagcgtgccagtcttcgcgatcacaaagaacaaagttgaaccctccccgagccttcgccccatgcagacggatactgctgcacaagaggttcaagacgccctccaagctctcttccactcggagtacgtgctgatgggagaatacgtcgagtgcgttttgccgctgctttatgctctgtacctcgccgtcctctaccatctccctactgcagcttactacccgcacatgaaggcgctgacggcggacaagttgagcgacacgcttgtaaatctgctgctgtacgcactcgttgagttcgcctcgtttgttggggtgattgtactgctgaggcgcaagttcggcttctcgccactgtaccagttggcgttcgtgctggagacacaagcgcgcgcgttgcagagccaactgttgatctgggtgttgtgtattctgcagttcacgttggtgcataatggtgagggcgctggtgggatgcattttattgtaggaatccaatgctatggctaaccggatttgtggatggttgtggtgttcaggagtcaatctggagaatccctttgggaagatggaatatgcataacttttaggcgatattgcagcctcccgcaccaaatgtataccgcctacatcagcacgtacttcatagtgagttgacgagtgcgatgcagactgggcagcggtgatcaacctggtatattagcgatacagaggtgacgaatcttcgatggacgattcctggatgacatttctcccaggacacttgtctgactacctgcgaagcagatgcctattgatagggtccagcttggctaagatgaagatgtcgctcgtcgaaccgggatggaaatacccacgtaggtcccatcttgctgcctcgaagagcaaggtgctgtacctatgggtgtcaaagtgcaccccacgacaacgtaccagccgtcacgtcgccacgttatcttcagctccatctccagagtatttcgcgctgcaaagcgctactggagtcggacgcagatcggccaccgtgagcgatactccgtcgagcggatgctggctctccgcgactattacgagcaagcgtcactgcttcgggtcctgttcgtgtgcctcgtcacgccgttgccggcgttcgcggccgtgattctgatcgagtgcatcccgttgcgttcccctggtgaggggtggcgcgccaactacgcgttctgggtccggctgttcctgtcgagcttccccatggcggtgggcggcgtgctgcaggtgaagcaggtgatcccgccggggatcatttcgtaccgagccacggttgctattgggttggggacggcggtgggttatgtgtcgtgtgcgcttggtctggcggcgttgtggacgttcccggtgccgttcggctacgcgttgatggtgggtccgttcgtgtgtttcttcatggcgagcgtttgtgttgtggttgggccgaagatgttgtcgaagtctttgcgccagcagatcatcccgccgttgtcggttctggcagcccaaggcatgttggcgggttggtaccctccgttctttgccatattccatcaactctcggcgatacagcagactgcgttcgtcgccgtacttcccatcatcaagctggtcagcaagcagtacattgcgaaggtgtgcggacatttgcaggagtacatcgggccgaccatcatcttctccgtacgtctgcaacgtcctgtacagcgtcatctgcatgcagacagctatatcatcgctcacgaccgtgttcatgatcggctccgacgtctttttcatcgtgatcgcgcttcgtaccatctactgtcagatgaactcggtcagtgtatggccggagaacgccttcttgagcaagatcctgacgaaccggaagaactatctcgagtctctgcccgtgctggtgcgccaagtgttccacaacgtcgacattgttgaccccacaagcgagcctgttcgtgtgtgcgccccattccctctgcctcttgcagcacacagcaaagagctgatgactgagctttgctgtcctacgccgagcattgctccccacgcgacgagatacgctgtcaccgcgtcttctcctcggcgaggtctgagtttgaccgacatccgctaccattacctcactagagccgaggcactacaacggcgagctccacagttgcctcgcggggtgacgttcaacttgaagacgatgtcggctcctgtgctgcactctccacgggtcaaagtagccgcccgcagtctgtcgatcgtcgcgataaccacccagtgcgtccttgcgtcactcgtgtttccaccgttgcagacgaaaactgcggcacaagaggttcaagacgcgctgcaagccctcttccactcggagtacgtcacgatggccgagtacgtagagtgtgcgctgcccatgctgtacgcggtctacctcacagttctccggcacctcccgacggctgcttactacccgcacatgaaggctctaacggcagacaagttgagtggcactctcagaaacctgctcctgtttgcattggtcgagtttgcatcctttgttggggtgagtctactgctgaagcgaaagtttgggttttcgccgctgtaccagttagcgttcgtgctggagacgcaagcgcgcgcgttgcagagtcaactgttgatctgggtgttgtgtattctgcagttcacgttggttcacaatggtgtgtagatgcagagatagatcgtgctttcttcctatcattccgttctggtggctgaattcttgtgcatttctcactggccccttaggtgttaacctggaacaccccttcaagaagcaggagtttgcataacttcgtcattaattctccgtaaagtcaccaacaacctggtaagtgtgcttccaccacttttagcttcgagaacagagcgcaaactcgcctaaatctggctccgcttacctcaccagcccagaatacgagaataccggcacaggcgaactcgtcaaaattcattccgctgcacttgttacgattcactttgcagctcggacaaatggcgatagacgcacgggtccacccagccgtccctgtggaccggtcgcgcctgctcgtcacgcttggcgtcttcgaacgagtcttcctggctgtgcgaaggtattggaacagtattcaggtggggcatcggggacggtactcggccgagcggctgcttgccttccaggagtattaccagcggacgtctccaggccgcgccttcatggtttgtttcctcgctgtgctgcctccgtttgtagtggcgattctggccgagtttatcccgttgaggccgcctcatgaaggctggaaagccaactacatgtactggattagcctgttcgtgtcctcgttgcccatttcgactggaggcgtgtaccaagtgagagaaatcattgaaccagggaccatctcaatgactggagtcgtcgtcacagccgtcagatcctgcacagtgaacgtggtgcttacgatgatactcgcagtcttatgggagttcccggtcccgttcgggtacgtcatgaccgttgttgggccattcatcggatcgtacatgatcctcttcttgctgagcgtcggcccgcgcgtgttggccagctcgccgatgctacatcgccagatctttacgcagatgttggtgatcgctgcacaagggacgttggcgatcgcgtacccgacatttggagccatcttcaaccaactatcaatcatcgggcagaccgtcttcatctttgtgctacccatgatcaagttcagtatcaagcagttcattgccaatacgtcagcacatctgcacgaatatgttgggccaacggttgtgctctcggtggacgtgtgcaacgttctctacgtggctatctgcgtgcagacagcagtctccccactaacttcaggcttacaaatcgcttcggacgcctttttcgtggtaatggggttgaggtcgatctaccaccaatcggaggtatcgcaggcgcgacagagattaatctccatgaactcgaacctcccgccaacgcttaattacatccgcaatctccgagccctgctgcgtgaagctttccagagcccacgcgcatctgagcgagtaccgatccgaattcgagcgccatttcctctgcctctatcggatgaaagcaaggcattcatggaggagctggagcacgtgcgccgaagatgctcggttgaaacggagtttggtaaggatatgcgcctagaatctattacgactgggagcttccatgccaggagtcactacaatgagtggagggaaccgagtgatatactgtcatcgcctaaagccatcttggtgaatagttcgcacgactacatggtgacccattcgacgcaactaacggcttcaggcacagcttttgacagaccgatactagcacaccaagaacccagcgcggcaccgacagtcaacagctttccccaatctaaacgcagccgcatgtcgggcacagtggggccctaccacctcgaagtggtcacttccaacgtccaggactccctccaggctcttttccactccgaatacgtcgtactggccgagttcattgagtgcgtcatccccgtgttgtacggaatctacctcgccttcctctaccacctcccgactgctgcgtattaccctcacacacgctcgctaactccagagaagttcgccaacacggagctgaatattatgctgtacgcggcggtggagtttttctcgttcattggggtgaacctgctgcttcagaggaagtttgggttctcgccgctgtaccagcttgcctttgtgtgtgagattcactcacgcacgattctaagctacctctttgtttggatcacgtacattctgccgattacgctggatcacaatggtaagttgtttggattctgctctgggatacgatacctatctaacaggctgttgctgatttcatgtaggcgttgaccttgaagctcctttcgaatgacttggcaataatgatttttgttgttgcaacaacgtggcgacggtcctgaattctctgattgacgagccttttgtcctgttgccactgtggcgttagccatagctgtggaggttctgtaatgactgatagctgagttgaacgtggtgacagtgtaggatggagaatactatgatagcgatgtcttgtgatgaagtgagctatgccacggcgaaaggggttggaacttgctgaagcaactgcaacctgccgcacctgacgtatttttgggcgggccaagtcgtttttacgatagcagtcaacctttagtagtaagcaagcgggatagcatcaaaaacattgttcgcagattgcccacgtaggccatttttagatacttctgtgaagtaatgtgtttgttctcacggccaagaataccaggaacggagaggttgtcagcattgccgccacgggccaagcacgttagcggcattcggaccgcagaggctacctggttgactcatcgagccaagagatggcggtagacgtacgtgtccaccccgtcgtgcctgacacccaaccgcccttacttgtcgcgcttggcgtcttcgaacgcgtattcctagcggcgcgaggctattggaacagcatccaggtggggcatcgaggtcggtactcggtcgagagactgcttgccttccaggaatattaccagcggacgtcgccgatacgcgccttcatggtttgtttcgtcgccctgctgcctccctttgtgatcgcaattctgatcgagttgattccgctgaagccgcctgatctcggctggaaagccaactacccgttttggatccgactgtatgcgacggcagtgcccatcgcctttggaggcctctaccaagtgaaggaagtcatcgcaccgggagctgtatcgactgtggggagtgtacttataatagtcggcactagcacgtgttacgtgtctttggtgatgctagttgcagctttgtggaagttcccgatcccgttcggattcgtgttgagcattgccccattcatcagcatctacatggttctcctcacgttgaccatcggtccgcgcgtgctgtcccggtctccgaatctgcgacggcagctctcattgcagttgttcgtcgtcgcggcggaaggaattttgggcatcgcgtacccgactttcggagcgatcttcaatcaactttccagtatcggacagaccgccttcatcttcgtacttccgataatcaagttctgcatcaagcaatttgtcgcaaaaatgtcggcacatctacacgaatacgtgggacttactgttctgctgtcggtcgacgtgtgcaatgttctctacgtggcgatctgcgtgcagacggcagtatcaccgatcacatcgggactactaatcgcttccgacgcctttttcgtgctaatggcgttgaggtcgatctactaccagtcggacgtcacccaagcgcgtcaaagattgctatcggcgaattctaaactcccggccacactcaactacatccgcaacctcagagctttgctacgcgaagccttccagagcccacgggcagctgaagcttctcgagttccgatccgcattcgcgcgccattccctttgcctttatcggatgaaagcaaggcgtttatggaggaactggaaatggcacgccggcgattttcggtggcaacggagtttggggggaagaacctgtccgctgatttaaaaatgtctaaaagttgttctcgtggacaaagtgccaacatccattgcagtgagaagcgcgagtcgagtcgaacgatgtcgcctggtaaaccaaggccagcgctccattttcaagactgcattcagctcccttcgactcctccacgcaacagtattggatcttcttttgacaaaccggtgctagctcacaaagtttcggccaaggctacagcagcatcgggcaccctcccacgctctacggccagtagtgtagctacacgcacgacttccagggcggagacctaccacctcgacgtggttatagctgacgttcaggactcccttcaggctcttttccactccgagtacgtcgttctggccgagttcatcgaatccgttatccccttgcactacggaatctacctcgctgtgctgtaccatctccccaccgcccaatactatccaaacacgcgcacactaaccccggagaaattcgcgagcacagagctgaacatcatgctgtacgcggcggtagagtttgcctcgtttattggggtgaatctgctgctccagaggaagtttgggttttcaccgctgtaccagctcgcgttcgtgtgcgaaacgcactcacgggtcattctgagccactgcattgtgtggatcatgtacgtgctaacactgtcactggatcacaatggtaagtcgattggaggaaagtctggcagtagtttaaggcttgagtgctaacgttgttgttggtgttctgaaggcgttgaccttgaaagcccttttaaatgatgactcagggcataattaaattaaggccgagaagggattataattatgccagaattatcactgctcaataagtgaaaggcacaatagttctttgtaatgtttgtatttgtttctgtacgtattccagatctaaaactatttaaatttagagtactttgcatactttttggcactggactgtaactcgtacggcacgacttatctataaatcgtactcaagtacgaattgttgtaagtcatgggtggtcaatgagcactaagtagagcacaaacgccatctcctgaatgatgtagcacatccagcacggattagcgtccttttggcacctttagaaagtgccatttccgagccaaatcgggctcggaagacaacttgagcaactctcgttcaaggctactatgatttaccgcgaagtacgaacactaagtagtgcactaaataggagggcaaactggatgcaaagcacagtatttattttgaactgaaatataataattcaaaaatattattatgacgcactgccgtttgcagatattttggtcaacgcatgcttattatctcgttaataatcttaattttaatctagccagctcttaatgaagacctagaccagatttatatatctccccactacaggtctaagatgcaagcttggggctctatttcccgaccaaaacgcttagctgcggcttggaaacgcaaaaatgcctttctagatgggccaaatcaagtttccgggccgaaatccgacctcatccaaagcacaaaagtgaagcagccctctcctatctcgtgtccactcatattaagagacaggcgtggtctatttaagaggtttattttagagagcaaagtatttgcaagcggcaatattaatataatatatagttattgtgcctttcacttattctgccgtgataattctggcatagctctaattccttatcaaccttaattatgccccgagttagctatttccaattttattccgggttgcccctccgtggccgaattaggagcggcgatggtgaggccgagttaaggcggaataagctggcccagcctgcgttaggcggaaacagagcgattggcggtttcctacccgccaatacatgtcattctgctcgtatctgcgtcgatcggctctcaaatgctgttcgcgaagcgatcataatcttcggcagaattagcactaaagaagcgttgatcgcccttttatgactctaattccacctgaattgacagctcacccgccaaaatacgtgaaagccacaatataaaatattttaataattttacaataacaattataaaaatcaatggcattagatataacttcatatttatttgaactgaaattattaaaataattgataataaatgtttcaagcaaattgtattgtgccttttttgggcaaaacgcctcggatttgaggtcctacgtatcctacgtaagacctcataaaagttagcaccagggccagtaaaaccatacataaataaaaactgaatgtaaactgagcgaatgacttgcaaacgtaggccgacaagtgagcgcgttcagtaccgctatacctgcacgtgcgtagctccacgctgagcacggtgacctggttgcggtgctgcctgagcctccgcctgtacgagtgcagccaaactatgcatttgccacagctgctttcaggcgtactggcctgatctagtcctacgaaggactcattaatcctacgaagaccaaaatggccagcttaacccctccagaccgggaggccgaaagaacatctaaactgcatatgcagcgtaattagactaggggctcaaaggggttatcctgccggtgacaatagcgtgctaatcgtgcataccgacagtttagcaacggcccagtcgtttccccagcctgaataatgcagcttacaggagagatggacagggcactcacccaaacccgccgaacagaaacggaagtcatagctactccgaatttccaaaattctgaaatcaaacttcccatactaaagcacaagtgaaaagttggggtgccacccccaaacttagagcaagctcgtgattggtctgcatagattctatgcacaatacaaaagtcaagtgaattcgatggtcaactcacgcaatcaattagcacacatgattttgcgtgaaaagatgctgcgtataatgcaagttgggatggggcctaggcaagagccaggagaaagtgtgcaacaacattattccaacgctgatcttcaacatactctgcaggcacactgattactccacgctagacggacgcacattcattaactgcttcctgcatatatgcagcttacggactacgggtttgtgcgacgtctctttgtagatgcaggagttcctggtgttgaaggtgttcccggggcagtcgtgtaatgggcctactttggctcactactttagcttacacgtgtgcgcgtgtacgtgaggaagcgtagcttagtttaacttagagttaattatactcgggcctccgagtatagattaatctaaataaacgatccaaataatgtttttgggttaaaatgagaactgctatttttgttttatgtttctgacttcctctaaatgtaatattctaagataggaatctgccaacggctggttggcagaattccaatgctatgcatgtcgctcattggctaagagatgctgctctcagccaataggaatcctaagtctctatggaccacccgtcgtggtggtcgtaaatgtatgtagcctttggtgtgtctacaccaaggtcgagaaagtctttcgaacctctaacagacgtcgtgtctgttagagttacaagtgactgtagcctcttgtgcgtgtaaccctgttacaccatccccccctcaaggttagacgcgccgagtcacggcacgtcaatcaggaaattgactattcgtcaattctttacgttggaagaaagaaaacttgagctcattccgcaatgagctcgccgcagaagaagaccgccgccgcatcagagggtaacccttctgttgctcagtaccatgagcgccagcaggcaaagcgagatgcgctcgctgcaaaggccgcgtcggggacaacccagtcggagattgtcctcgaaggttcctctgtagtcaacgacggcgttgactacgaagacgacgacgtggagatggaagagggcgcggccgcttctagcaagcgcaaggagtctatcgacagtgatagtctcgacccgcatgccgggtcgagacgccctcgtgagtgagacgactcggacgcttcgagctcgaagcgttcgcgcggcgagagcgacactccgctctctgctgctggggctttaagctccccgcgtgaggtggcgtcttcaagttctccacgcgctgctcaggcagcgcgcgatccgtggatggcgtttgcgtcagagatcgcagaccgtgtgggtaacaccgtgcctccaattgaaattccgctgtacgtatgcagcgggatccacgatgatgttgtggcggaggagcagcactttgatccgttaacgaatcaaaggcgcgattactatatcggactctttcacgagctccgatacttctccagcaagaagaccttttctcgcagcaaagtgcctgagtggcaggcactttgtcaaagttggaatgcttttgttgagaacttcaacaagaagccggctgcttaccgtgagcgggttaagcacgcccgtgaacgcttcgagacattctcgacgcgcgggaggttggagcagctccacagatcttctgtggacgctggtattccatgcgctgtacccgaaggccaacagtgcacgttgtgccttccgggcgcggcgcgcttgagcgaccgcgatcgcgacctaaacgggtacacgacgattcgtgtacctgagagtctcaaggatctccgtgccaagttcttggcacgtgacgaacgcgacgatcgtggggcctcgggcgctgtaggtgaccacagcgctcgcactaccttcgcggcggcagtgcgtggtgagcttcgtactccctcaccatttccggaacgtcctgcagcaggacgttccgtggctcccatgtatcgtggtggggcggaaaccctctccaacgaatacgataacgaaccggctgccggttcgttttcgggatactatggttcacaatacgctcaacaatccagcgtgttgagccgcgggcgtcgcggatcggaggcggcggtggtgggaacacgctccgggtatggtcaacctggggttgacctggtgggaacacgctccgggtatggtcaacctggggttgaccttggcccgacgctcgaggagcgggtcgctgctgtggagcagcttcagagccgtgagttcgccgctctgaagcaggagatggcgacctgatagcccaagttgctcaggcctcgcagaccgcgtcggacatctctgtcgacgtgggaggtcgcgcagcacgcttggcccagcgcgttcacgcgctggggcagaggttcgctcccgctggggcttccgcttcgggccagccgagctaggtggctcgtgctgccggtatggcttcagccgcccgacgtaaaaggtcggatggaggcacatgctagatggaatatctagcgtgtaggcgttgccatgccgtgccaacacagtgaacggcccgatgaagcgcggagcgagcttgctcgccccgaagtcggaaaccgcatgtttaggcaggttttgagtagctaacaaaaccaatgaaccctttttgaattcatttgtgttgcccctaccaacattgtctacgttcagcttctgtcggtcgacagaagctgcaatagcgtcttggacaaaccgaatgacggcttgtctgcgctgcacgaagttgattgcgtccgagctgaactagttcagctcgtttctagcagtagtcccggcctctgcgttcgtcttcgcggtgtctgtgccctgcacagacccgttcttcttgttcttcctgctcttgtcggcgtctgtgccctgcacagacgcgtgcttcttcttcttcttcttgcgcgtagtcgcggctgacactgtgcaagtgtcagcggcattctgcggctgctgtgttgcagtcgtagattccccccacttaaggaaggagccaccatcccgagtagactcgggaggcgtgggtgcctgatgcattcacgtagaacggtgtatgcccggtcgaggcatgcaccgagttgttgatggcgaactccgccatcggcaggcactcgctccagtgttggaacgagtgagcgtagctcttaagcacgtctacgagcacgcggttcatgcgctcggtctgcccgtccgtctgtggatgatccgcagtcgacatcgaaaattgactcccaagaagtgtaaacacttcttgccaaaggtgtgcagtgaagcgcgggtcccgatccgactcaatgtcgatcggcatgccatggtgtttgaacaccatgtcaacgaacagacgcgccgtctgcttcacagtcacttcagcgggaacagcagcaagatgtaccatcttgctgaagcggtcaacaaagaccacaacgcccgcgttcctatggctgtccgggggaagaccgaacacgaagtccaaagacatggactgccaacactcccgtggagttgatagtgactgcaagggagcctgcgcgaaaggcgcacgcttcacacgttgacaaacctcgcaagcacggacgtacttgcgcacccatttatactggtgggcccagtagaagtctcgcgtgagaagaaggtatgtcttctcacggcccggatgccccgcagtcggtgcatcgtgatactcatacatgatcctgagtcgcaggtcatggtcattgggcacgacaacgcggtccgcgttgtcgtcgactgcactgtagagtaataacccgtcgtgcacccggtaatggtgtgcacgagcacgaagatgcttcggcagcttctgacgagcttggtcagaaggtgctgaggcgtaggccagcaagagcttcgcgtccgcgtcgtgcgcgtacgcgaccttcacgtcgtccatcagtgacgacgttggggtgctcgatcgcatggcgtcaatgacattgacgtcggcatcagtcgtgacgtagtcaggtcgacgcgagagcgcgtcagccaccacattgattcttccgggtttgtactcaacccggaagttatactctgcgacgaatgagagccatctcgccatccgttgcgagatgtgcggcgacttcacagccgtccgcaacgacgcgtggtccgtatagaccacgaacggtttgcttccgagtagatacactcggaacttcgcgagtgcgtacttcatggcaaggagttccttgtaatgtaccgggtagttgcgttcagctggtttcagctgacgcgattgatagtagacgacacgatcacgaccttcgtgatcgtgctgcatcaacgcacatccgattgcgaagtcggatgcgtcacacacaccgtggaatgggcgatcatggtcggccaccgccaagatcggcgcctcagtcaagccccgcttgactgcatcgaaggcctgctgacactcagcagtccaaacccactcggcgtccttcttcaggaactgtgacagcgggcgtatcatgcccgcgtagtccttcacgtacttgcacaagtacgtggccaagccaacgaactgccgcagttccttgacgttcgacggcgtcggccactcattgatcactctgaccttctcagggtcagggcggacaccgttccccaacgagacacccgagcacgggtatctcgctcgctccgaagatacacttcttcaggttcgcatagagcttgtgcttgcgcataagcgcaagcagcttcccgagatgcaggttgtgcatctcaacatcgctcatcctgtccgcagcccggctgtggacgaacacatcgtcaaagtagctcggtgcgaagtcgcgcaccgagcgcaacaagtgcgtcacgcacctgttgaaggtcgcaggggcgttcttcagaccctgcggcatcactagccactcccagtgcatgccgctcggcgtgctcacagccgtgagagggatatcgctctcacgcatgaggatctgatagaatccatcgcgcagatcaagagcactgtagatagtgctcctggccatcgaatcgatgatgacatcttttcgcggtattggtgtctgcgccggtatcgtcgcatcgttcagcttgttgtacgcatgaacgatgcgccagccgccctgtggcttcttgacacagaacgtcggagcactgtgcggggatttcgattcccgcacttgtccaactgtgcgacgactctcaaacaagtcgtcgatcgccttgacctgctcttgcggcagtggccactgccgcgtgacacagtacttcgtccccggcacgagatcaatctcgtgctggatgcccttatcctgcggaagctccgccggaatctcttccggaagtacgtccgcgtactcccgtaagatctcgtagtaggggctcgttttcaacgagtcccagctctgctcttcaaagcgctccttcttcgtcttcgcactgagagtatcctcgctctcagtggtggtctccatgaagaactacctcagttcttcattctcgctcttcgttctctcggcgtccgagagaatgcatatatgctcgatgcgtccatcgtggaagtcacgcgcgaagcgcttccagcgcaggactggaagcgaagtcaactccgacgtttgcgtcggagggttagcgagagccatctccctgtaccggaacccggcacaggtacgcgtcaagacgttcaacgtctcaacgtccggcttctcagcctccgtctgcccggcagacattccttgtagcgtctcggcctcaggccgagacttgcgcagcgaccttcgcatgcgccgtcttcttgtcctgcggagcccggctccacttggttcttgacctcgtccaggcccagccgtggacgggtgttcttctttagtaccgccggcgggttcatcgcgcgggcgagcgacttcaagccgggcttggccgcccggcgcttcgtcgtgcagcccggctgcacgacagcatgcaagtttttccggtgcgggacgtttgcaaccgtccgcaccgcctgcagcgtcggctcccggagccgacacgccatcttcaccttgacgcctgttattggcggaaccctccattacggagggtgcgtcggctccccgagccgacgaatcaaatttgtccaagctatcgactcccggagtcgatgcgacttcaatacctcgacgccaaccattggcggagacccccattacggagggtgcgtcggctccccgagccgacgaatcaaattcacccaagccatcgactcccggagtcgacggcgttacgtcaccttggctcttattattggccaaaattgatccaatcagattcgcgtcagcctccactgctgaggcgtgtgactcgtctgcgtcatccgtgccccttgaggtcggagactcttcctgattcgctgaaaagcgggtgtcgatctccgaggtcaacacattttctccttcagccgtcggcggcgacgccgacgcttgctgctcttgcgcgcgtgctcgcgcgcgcccagggcgttccgggatagcggcattaggcgctgtctcgagtggggagtcgcgcgcacctgtcggtgcgtgcgtagcggcaacagggccatcgctcactgttccgctgtcgcgaccgaagcgcacgagagtgcgcttctcccaatcgatgactggatcatgtcgtgcaagccacggcatgccaaatacaatgtcaaacttatcgtccagatccaggacgataacggcctcgacaaactcttgatcttcatgcgtgaagtgcacgcgtaccatgcgcttctcggtcttcatgacggcacccgttgacagtcgtacttccaacatacttcgaggtatctttaaattctcgaagtcaaggcttgatagacttcgcagtcgaacaaagttcttcgacgcgccagaatctaccaaagcacggagagagccgcttgttctcatcgagttcacattcaggatgacaaggtcaggcttgtcatcttggttcttgcagtgagaatgaacctcactgggggctgcagtcctcagtgtcgcgtgtccaaggtcgacacccggaactgcattaccagtggggtgccccgcgcctactggcgtccagcgttttttgtttggttgcgacggtgcccggcaccgccgcgatagccaccctgctggtgcacggggtccgtgcactcccgagcaaagtgaccgattctaccgcatcggtagcatcgcacattgtttccttgcgactgctggggtccagcagttgcagcgctcgagaggtccatgggttctgggcctcccgtcctcactatcgggcgaggctgtggcctcggcgcgtgtgcatgcagcttagcctgatgcaggctaaactcctcctgcattgcaagagtgattgcagcttcgagagtactcgggtactcacggaagagataggtcttcacaggcccatctctcagccccttcatgaacgtgacgactttggtcgcctcgtcgatcggattggtcacgatgttcgagaccaagtaccgtgctctctgagcgtaagcatggacatcatgcttgccctgctgcaggtcgaggaactccgccctcgaccggaactcgttttgcggtggctcaaacgcttgtctgagctcttccttgaaaccctcgtacgtgctaaagcacgtaggatccgagagtcggcgtccatacgcccaacttcttgcacgtccgccaagacatgacatggcgaacgcgaccttcaacaacgggtcgacgatgcgtcgagccgcaatggtagtgtcgagttcgacaagccaacggaggagaggctcgccctctcttacaacgtaattgctcacgctgagcttcagcgattgcgcgcgcggtgtcgtccccgccgacaccgtggtaaacgaagcagcatctcgctgctccctcatgatgaatcccagagcaacaccatgttgctctgtcggcgttagcgtacgcagcatcgtagctacagccgcctcaccaacggctgttgacagtcgttggagagcttcccactctgggtccgacaggtggggacagtcagcgcgtgcaacgtgagttgaaggcgtagtgaagctttccatggacacctccgtatccatgggaaggttctcagctccgcgttcgtgcggtgacgtacgaactcaggtagtcggtcgttgtttctgacttcctctaaatgtaatactctaagataggaatctgccaacggctggttggcagaattccaatgctatgcatgtcgctcattggctaagagatgctgctctcagccaataggaatcctaagtctctatggaccacccgtcgtggtggtcgtaaatgtatgtagcctttggtgtgtctacaccaaggtcgagaaagtctttcgaacctctaacagacgtcgtgtctgttagagttacaagtgactgtagcctcttgtgcgtgtaaccctgttacaagtcgcgtctgctttgcggcgaactcggattgactttgcgtcttccactgggatcagctttccattggcccaatccttgtgccagatgtcccagcacgtcatggccaccccgcgcaccttccgtcgagccctcatacacagaaatatcggtcccacatcatttcagtcgccgcagaagtacgtcattgtcgaggcgcgctgctcgccggagcgcagagcagagcagaccttgcaggcgcgctgcctgcgcttcgcctgcgtgccttcattgcgccactcgtcgacttggcgtgctgtgtgggtcgaaggcgggccaacaccaactgggataggttcgtagtttggggtggctggctgatgctgcgtcccgaagctgtttccttcctacatgtcagtcgcttgaagctgggtaagttgtaagtggagcttgatcatgaacttgacatgcgtgagggggcgcgactccttgttcttgtggtaggccttgtggacgatgtaggcgttgacaatcgccaggtcgatcagacccagcactagcgacttgtagtactttttgaagcggagtgcgcgttgcagtgagtagcgctgcgagcgcagctgatcgtgaacgtccacgccccccatgaacgcgtggtaatctttgacgacccgcgggcacggcacctccacctgctcggcaccatcctggcgcccaactcgatcaatttcagtgctcccgcccgtgcaaaggaaatacagtggtcgggagtcccaccaactgattgccgtcatgttcggaacaagcttcgatcgagcgatcttgaatgagcctcgtggaatagtggctgaatttcgcagtgaggcatggcatgtggtcaagtgctttgttggaccatgaagaacaaaagtttgtacatcaaaacaagtttgcccgtcactattccggccgttgttatttttagtttgaacatcgtaaaacacacgaaccagagcaaagatcagacgccactgaccttcaacctgaatataggtgcgttgggcaatcttagtccaggaataccagcatgagcgaacactctatctgctgcgctgctgcagtacaatactctcgtctccgtctgcccacataccgactcgatggcatcggtcgagcgcttgctcgcctttcaagactattatcaacggacatcgccaagccatgccttcatggtgtgtttactggctcttctccccgcgtttacagtggtctggtcgagtccattccgttgaagccgcctgacgaaggctggaagccaattacaccttctggatccgtttattcgcgtcgtcactgccaattgcatttggaggggtgtaccaggtaaaagaggtcctcgagccaggaatcatttctacgaccggaatcatcgctaccgccgccggttcatgtacggggtacgtggcgttgacgatgctagtcgccgctctgtggaagtttcccatcccttttgggtacgtcctgactgtgggtccgttcgtggcattctacaactttgtgcggtctgcttcgtaccaacgtgcaatcaaatccgaaagtcgcaaaattcatattgcaaatttttagttagcaacttcaattacgcattcaaagatggaattacggcaatcaaagttggacctctaagatctccatggctacgtaagctggcgtgctgtgctcgcgccaaaagcaagggcgcgcgggttggcgcgcactatagctgacgccgaccgaggggagctcgcttcgcaattcgccttctccttcgcagatgtccctccaaggccgcgttactcgccacaccgtcctcgagaagcagcgtgtgcttgacgcgtatcgcgccggtcgtcacgaccggctagcggttgccgccagcaacgatatcccggtgaccacagcctacgacatcgtcagcaagggacgggcggagagtcttcctcgcggaggtgcgaggaacgtcaagatcaccgccgaagcgaagttgttcctcgagcagtacttaaacgacgactgcacgtacgcgcttgcgacaatgcagttcatgctgctggtggactgcaacatcaaggtgcacacgtctaccattagtcgccacctcaacaagctgctgtacacggtcaagcaagttcgcatcgagccgaccacgtgcaacaacgacgtcaacacggagaagcgtcgcgtgttcgccaagaagctcatggctcaccaaaaagaaggtaactgcatcgtttattatgatgagactaactttaatgtgtatttgaagcgccaacgcggtcgtgccaagcgcggtagccgagctgtcgtgaagcttcctccatcgaagggcgcgaaccttcagatgcaatgcgcggtgtcgaccagcttgcggctcgtcacctatcgccttcagcgcggcagcattcggatggcgaacaacgccgccttcgtggaggacatctacaaggctgttgaggcctctggcacgttccagcggtacttccaggacaagaatgtcgtgatcgttctggacaacgctccagcgcaccggcaaaccgaggagcgtgtcacggagtaccccgacatggagctgttgcgcttgggaccttactcccctatgtgcaaccccatcgaggggtgcttcagcgtcctaaaatcccgcattaagcgtgacttggctctggatcgccacgaaatctgtgatcgctcgcgtgagccggacagcaacggtgagatcctctccatttcggaatgccagatgtgcatcctggagcgcgccgcgacctctaacacgagcgtgatgaccccagcgctggtggccagcatggagctgcactgtcgcgacttcgtcaccaaggcagcgaacaacgaggacatggtgtacggcatgtaacagggctcgtcggacaagtagtagtagcctactgtacgaatttgattgccgtaattccatctttgaatgcgtaattgaagttgctaactaaaaatttgcaatatgaattttgcgactttcggatttgattgcacgttggtacgaagtaggccgcacataggtgtacatgattttcttcttgctaagtatcggaccacgaatactagcaaactcccccgcattacgtcaacaaatttattcccaaatgctggtaattgcagcccaggggatgctggcgatcgcgtattcgacttttggagccattttcaaccaactttcagggcacgaacaggccgcgtttgtcttcgtgttaccaatcatcaagttctgcataaaacaatttatcgccaaagtttccgcacatctgcacgaattcgtcggccccacggtggtgctttcagtggacgtgtgcaatgtcctctacgtggctatctgcatgcagaccgcagtgtcgccaataacttctggtctacttatcgcttccgacgcgttttacgtcctgcgttgcgaacaatctactaccaatcgaacgtatctcatgctcgacgaagggctctgtctataaactcaaagctcccgatcaacttgaactacatccacaacctctgagcgttgctgcgtgaagctttccaaagctcagacccacttggagcagaaggtgtgccgatccgtattcgtgctccattccctttatcgcaatcaaatgaaagcacggcgtttctaaatgatctggagctgacacggagaagatactcggttgaaggtgagcccggtaaagacgcccatgtagagtcaaagtcaactgaaagcagtatcagaaccccatatcgaaagtcgagtaaatcaacgacaacatctaaaccaaggtcatcacgtaactctcaggagctcctcgaggtggactccagcggaacggcaccaacccgtaaactatctgccccgacctcgggttctaatagtaccacccgttctaaacacagcagcgcgacatcaagagcggcgctttaccattatcaagttgtcgtagcgaacgtacaggactctttccaggcactcttccactccgaatacgttgtggtggccgagttcattgagtgcgtgatcccaatgctgtacgaagtctacctcgccgtcctgtaccacctcccaatcgctgcgtactacccgcatacgcgtacgctaaccccagagaaattcatccgaactgagctcaacattatactatacgcggctgttgagctcgcgtcgttcgttggactggatctgcttctccgacggaaatttggattctcgccgctgtaccagctcgcgttcgtatgcgaaacgcaagtgcgtactctccaaagccacctcttcgtctggatcttgtgtattctgcagatcacactggttcacaatggtcagatgagatgctcgaaacgctggtcacggattgggcctagtgacaaacttgtgtttgctgtgcatgtaggtgtcgatcttgaagctcctttcaaatgagttgagtatacccacaacactggtaaactacttagcaaactaaggcatttcaaattcttgaatgaatgaatggttcgattaccgatttaatgtccttctcgatttggacagatactatgtactggtactagtcatactagataatgaaaataaaactaatccaccactgtgcgaaacaccacgccggtgcggtatgtgagacgaagttgtacatgtcgtgtgcgaaagttggatgcgttcctttggatgaacgcgcctaagtgcttggattgccgtaattgtcgcagaacacgctcgtattctttacgaatgtcggggctggaaatccggagtagtctgcagtagtggcagcaaaatgctgaatgaatgcttgaaattgccgtgggcattgggtccggttctctgtcttcgaagcagatgcagttcccttctgtccactggtggtgaagtgtagcgcaacgaagcacattccacaggcgcagcaaattcttaacagaaaacacaggaagtaattcatattcgccataatttaacgttagtaggagggtttaatcgtattatatattgcgaagtaatataccatagctgtgttatcattactgaggcagaactacgactgggaagatgcttcctgtacgattaaccaccttcacgatcaaaaataaagctactctatgaataccttgtccagccacaaaacttttcctctcagctgtatcagcaggtcaagcctgagggggcgttgagacggaatggtgtttggacacaaggcctttcttcctcttttccaccgattcgttgacatggtttactttgttagtgacggggtcagcgccgcatgggggcactggacaagcattcaagtcggccatcgcggtaaatactccgtcgagcgtctgctatcatttcgcgattattacgtacgcacatctcctacgcgggtgttaatagtttgtgcgacgggaatgctaccagcgttcatagtcgcgattttggtcgagttcattccgttgaagccgcctgacgaaggctggaaggccaactacaccttctggatccgcttgtatgtgtcttcgctgcccattgcgttcggaggcgtgtaccaagtgaaggaggtcattgagccaggagctatctccacaactggaattgtcgcaaccgccgtcggttcctgtacgtgttacgtggctctcacgatgttggtcgccgcattgtggaagtttcccatcccttttgggtacgtcctgactgtgggtccgttcgtggcattctacatgattttcttcatgttgagcatcggtccgcgcgtattatccagctcggcggtgttgcgtcggcagattttctcgcagatgctggtgatcgctgctcaggggatgctggcgatcgcgtatccgacgtttggagccatcttcaaccagctctcgggccatgagcagaccgcgttcgtgttcgtgctgcccgtgatcaagttctgcatcaaacagttcattgccaaagcgtctactagtatgcacgagtacgttggaccgactgtcgtgctgtctgtggacgtgtgcaatgtgctgtacgtggcaatctgcgtgcagacggcgatttcgcccgttaccaccacgctcatgatcgccatggacgcctttttcgtcttgctcgcgtttcgctcgatctacaagcaatcttacgtgactcaagccagattatctgcgagtctggtggatgctccgaaatccaactacgtgcaaaacgtgattgcgctaattcgtcaaacatttcaactcgcgcgtgttgttgatgcgctaccgatgccaattcgaatccgcgcactgtttcctctgcctctgacggatgaaagcgtggcgtacatgaagaaattaatcagagcaaacgaaacatctgccgaagaagtggaaatatctgcggataatccgtcggatcccccacttatcccttgcgaagacgaaattgctgctgtaactcaaccaaacgcatcgcagagatcaacactagcgctattagatcgagttaccaaccataaacgaatcgcaccagccccagagccatcaaactctacccagccaaagcccccgtcaatattgatccggctgagtaaagtttttatcccgcaccaccccgaacatgcagcaaaatcgaagctacccgcgcatatcacggttttcgcaagatatcactcatcggccgtcaatgtccaagacgcgctccaggcgcttttccactctgaatacgtcgtcatggccgagtttatcgagtgcgtcacgccggttctgtatgcggtctaccttgccgtcctgtaccatctcccgactgctgcttactacccgcacacgcgcttgctgacgcctgaaaagttcgcaactacagagacaaatctcattctttacgccctgatcgaaatctcgttgtttgtgggtctgaatattctgctcagaaggaattttgggttttccccgctctaccagcttgcgttcgtgttcgagacgcacgttcgcactctccaaagtcatcttttcgtttgggtattgtgcatcttgcagatcactctcgtccacaatggtaagatgcgaagcgatggctgcctcgtcgtggctcggaggctaagacaggggttttttgtttgcttgtgtaggtgttgacctcgaaaccccgttcaagtgaggggggtccgcggagagggagttagtgcgctatcttcagattattactacaagtggtacgaagagaaacagatcgaatttttcgtggttggtgcgtggcagactcgcgttgtaagttgactgtcatcaagtcattttttacggagctccaccttctctatttcagttcgaaagaaacaccggggtctgattagagttcaattccaggtaggaatcagtagcacaatattacctcgccatttataaatcacaccggggtctgatctgtacgtggggtaaatttggcatcttcgtgacatcagcaataaatgtattccggacgaactgcggttaagagcggtgccagccaacgcaagaacgagctggtggtagtgatcagtaaggctgtccatcttggtgactaaccatggcttttcagcggaaaatctacccagcgggaccctcgaagccggttcactgcgtgcacaacgtgagtaagagtctgcagaagttcatccaatctctctggggctactggaatcgggttcaagttggacacagaggccgctactccgtcgagtggctgttagccttcaccagcgcacctccctcccccatgttgccatcgtgtgcttactgggtctactcccagcttttgtagtcgctgttttggtcgaatgtattccgttgaggccgccgcctgagagctggcgagccaactacactttctggatccgcttattcgtgtcttctttgccgattgcgttcggaggcgtgtaccaagtgaaggaggtgattcaacctggagttatctccactactgtgttacgtggcattgacgatgctagtcgctgctctatggatttttccgattccattcggctacgtcctcaccatcggccctttcgtgattttctacatggttttctttctactaagtatcggaccacgagtgctagcgaattccccgccattacgtcatcaaattttctcgcaaatgctgcccaaggaatgctggcgatagtgtatccaacgtttggagccattttaaaccaactatcgggacatgagcagaccgcgttcgtctttgttttaccgattatcaagtttagcatgaagcaattcatagcgacggtgtcgtctcacttgcaggagtacgtaggaccgaccgtcgtgctatcggttgacgtgtgcaacgtcctgtacgttgctatctgcgtgcaaaccgccgtgtcgccactaacctcggcgattctgatcggcagcgacgcgttcttcgtcatcctagcgcttcgctcgatctacaaccaatcggatgaggctcgagcgcatcagcgtgtgctttcctccagctcgaagattctgctgaagaataactatctcctcgatctgatgggcctattgcgtggcgctttccagacttcgggggcatcggattttccagttccaattcgagtccgcgctccattcccactcaagtatattactcagtgaacaacgcacagacagcaagttgcatcaactcgcacctggggttagaataggtttcgtcaatgcagcggccgctggtagaagtgattttgtttttcttttttggaattaatgaccgcttttaaagcaggtgtcgatctcgaagcccctttcacgtgagagcatcaaccaaagggtatccgcaccattgtggttttggtgagccatgatgttggaatttctattcagtagcaaaagcttggccaggtgttcctacggtgtctgtaatcatgttgctacagcttttatcttttctttttgcttggtacaagtatctggtgatcggtaagattacgctgaaatgcagctagtaagcttccgtcgaggagtttacgtaaagggttgaaggtccgatagatttgactcacatgtgagtcaaatcttcgagtacagtaagtctcgttatcaaatctccatggaagtatgctgcgtgatcgattactttccttctcttacaatagtaggtagatgtgcctccgcttcttgggtgtctgaagaatgggttcatgctcagtttaccctctgaagagcatgattgaagatcggctgcacatggtcaagaagtaagcacaccaggggcaagggtcgaaagtgcgagccgcttgtatggccgccaccactcctcattctccatttctcctcgcctcaccaaggacactcaatccttttcccccttcgtttggatcaagagaagaatgcgtctgtcccgctccttgttcgtggttcttgcatccatcctcgtcgccgatggtgaagccgtcgagtccggtcaaacggacaagcaacatagggcgcttcgctcagctgacgcggaggcgaccaatgcccagcggaaccttgctcccatctcgacatggctgagtcagtggatggcggggagaatgtcgtgaagaaagcccaacaggcgaggctcgggagggccggacagcagaggttcaacaagaagatcgtgaacatcgagaattacgttttcccacactggtactcggtgcatgccgagaagcacttgatggtgaacaagtccccacaggaggtttaccagatcatgaaggctcgcggcgagccggactggtatgcaaagtatatcagcaagaaattcgacgagtacatcaagagctttgcgaggatgctggagtgaaaaaaagcaattgaacacagttggaccaacaaaacgaaggtggctggagtctccccgtgtctggtttttgctacactcatggtaattggtgtagttggcaataagatacgttcgcgcctactagtacatttcttcatattgaagctgaggttctttaatctagttgggattatcgtcggataaatttttttaaagctcactgggggttaattaatgtcagcctcgaacactgcgcgtctgctctgtcgtctatcagaccttttcttctttttaaaaaaataaattgagtttctgaacaagcgatatgaatctgatactacgagatgcgactaaatctatagcaccttcgagatcaaatcgtgcaatgttcatcgttaaatgttgcgctaaaatgtttgtggtccaggatcacgccctcgttactgagaatcggccctcacgctcaagttgcgagtcaacacgaataaagcgggcatttcttggtagctgactcgttggcgcctcttcttctagatgtgacctacctcttcgttattgaccgaatcgagtcaacacagactaccgacgactgcgaaccaacaagacgaatactgcaaaagagcgcgcctttctggtcgaacttttttacaagattacggagcagtttcagcgcatgaagacccatcctgaattcctcaagactttcttcgagttgaggagatcgggctccagataaattgacgacgtcgtggctttaatggtgaagtagggtctaggtacaaacgatgtccagcactacgcaaagctatatcttgtccacctcgcagtcattaatcgagtggaggaggtgggctgtacccctaccgggttagtgttatgaccgtaattaagatttaatggatggtagaaaacaatttgcaccatcctctaatattccgacttggtttaccttcaggtttgaagtctgaggaaataagactacgtgtcgagcgtgattcagttggttcgtgtagccgagttctatcatacatttctcctgcgctctggccctcctagtcgtggcggccagacagatagatgactctgaaaacacatttctgagatcttacgagactgtcgacagcgtagatgaataacaacataccgtggactagcgtcttgtacaatctaccggggcgattagatggtataaatctgcatcaagtctgaggtacatgacgaagcgagtggttcgttggtccttataattatcctcattagggttggccaacataaatttggctttcccgagggtccaagcaccgttgcccccagacagcaagccaacagcttacaggatgcaattgagttcaaagatccatcctgaagaatacccaaggtcgcgatgtatcgccgtcgttcacgacactctcacccaactttttgatggcgcagcacgctactggaacagcctccaggtcggccaccgagagcgatactccgtccagcgtctgctttccttcagagactactacgaacggacctccccgactcgagtcatcttcgtttgctccacgtccttgattccagctttcgtgctggcggtgataatggagtgcatcccgttgaagccacctgaagcaggatggagagcgaactatgccttctggatccgattgttcgtgtcctcgctgccgatttcgttcggagccgtgttccaagtgatagaggtgatcgaaccaggagttatatcgcctactgggattatcgtgactgctgtcggctcctgtgccggctacgtggccctaacgatgggtctcgcggcttcgtggagattcccagtcccattcggatacgtgttctgcgtgccgccatttgtgacaatctacatgattttgttcgtactcagcattgggcccagagttttggttcgaacgcctctactacgccgtcagcttttctcccagctgctcgtcgtagccgctcaagccgttttagcgatcgcttacccgttttttagcgctgtgtttaaccagctctcggggaagcagcagtccgccttcatcttcgttctcccgatcatcaagttctgcatcaagcaagtgatcaccaggatggcgtcgcacctcgaggagtgcgtcggactgattgtcgttttctcggttgacgtttgcaacgtcgtctatgttgcggtttgtatgcagacggcgatatctccgctcacgtcgacgcttatgctggcttcagacgccttcttcgtcatgatagcgcttcgctcaatctacaaccgtgcggatacgaatcatacgtggaggaaagatcgacagctaaaagctggttatctcgaagacttgatggacctcatacgcgaagccttccggtttgccaacaagccgaatgccttgccggtaccgatccgagttcgtgctccgatcgagctcccgctctcgttagaaagcgctcggtttatcggggatctggttcatgcaaagcgaagaaatgcgggagaagcgcagtccttttcgactttatccacacattcaatgtcaaggcaagaggcaaagcaaggagcgatacgctcacaggttgatgggggcacgaccaggaaggggccaagccttgggaccgttgatattatcccgaaaggacccgatcgtttacaggcgatgtccagcaggtcgttcgtacgagcgaattttgaagaggttatgcgagcgagttctcgcgctacgactgccgcgccgtcttgccacagtgttgctatagcagacgcgcgagacgccctgcagacgctctttcactccgaatatgtcatcatggccgaatacgttgagtgtgcgatccccatcctgtacggcctgtatctcacgtgtctgtaccatctcccgacagcggcttactaccctcatacccgctctatgacgcctgaaaggttcaagaacacgcagctaaacttcatgctgtatgcgatggtcgagttggtctccttcgctgggcttaacctcctgctcaagcgcaagtttgggttttctcccttgtaccagttagccttcgtgctggagacgcaaatgggcgttttgcagggccatttctttctttgggtctcgtggatattgcagattacgcttgtccacaatggtaagcttgagcttctttctactacggtggcaagaattatgctaatactttctattttgactcaggtgttgatcttaacgccccatttaaatgagaagcgctactatttggcctcagctttcaacttacgcgctacatgtaccagagttagatgacgaaaagcttgaagttcataaaaaaagcttcgagttgacaaaaaaaatgtcgaactgactcaaaacttctgagatgccagatgctgcttgtcgagtgaaaggtgtgtgatgctcatagtgggaaaaacatgctatccggtgtgaaaaactacaaagatccgatacatgcacgagttgagaaaatagatacgagttgagtcatggatgggaaatatccggattaattacgatatgcatattgcctcccaatccaagaaaatacatcatttaagttttttttagttttcaccatgccgataaacaatggacactacgaaaaggagtgagtgagcgatatatctatcatcttagttatattcttgtttgacttcatcaagtaagagcaggtagagagtagcctcgcgcaggctttttggtgaagttgcaccattgttagcgctggtgacgagtatcgccttcatgagggttgccaataggctgaaaaaatgcgtgtgacgcgatcccctggtttgtgattgacatcgctaaggagaactctagctgtataggcggcgccagcgtctttgactgcaacggcgtgtcggctattgtgtaattttgcaattcagctttgaatggtggagcaaaaggtagataaatatattataagtttcatctacttttattaaaaaatctacgcataatttaaattcgactccttcccatcttgacgatataccaggctggtattaccagcatcaaccaaaaccgtgtgcatgtgttgtctttacggattttgcaacggcttcggtattccaaacatttaggcgatttcatcagcagacatgacaacagattcaagcttcggcatgtacaactacacttaacatcccgctctggtgtggtgttccgcactgttgtcgagtaagtagcacattagttcacataaattgagaagtcagataaatcggtaatcgaacacatctttctttacggattttgcgccgtcatttcagggtaatcgtgccaatcaccaggattcagcactccaccaaaacagcgaagttacctgctgtactttgctaatcaaggtcagagacagtgtatgcatggcagtgcggtgtgttcgatgaagcgacgtgtataacggagaggagcgttctcgcctttgactggttcgaccgaagcggcgacgatgacaggctagccgagttttttattgtactgtagtggcatgggaagcatcaccaagatctgtcgatcgtccgatccgatacctactgcatgtaacgtgaacaccttgtaatctccctatggatcggccgagtgtaatgggggaataatcatctatgagtggggttaccctgagtacgtgcaggtacatgtcataggtcagaagctcagaactctcactttcgaattctcctcgacgaccgcagttcctaactccgaccaaacacgatgcgcctctccagcggccttctcgtgctcgtggcagccgcgctgctggcggtgggccaagctctcgactcgcagtaaacctcgccgacatttctgcgatccgccgacgcaacgactccgaccatccagcggaggcagtgggagggcatcaaggcggccgtgaagaagcctgtcatgtcgctgtccagtcaagccatcttaaaggaggacgccaaggcgcaggaacagtttatgtttgccaagtggttcgtggccaagagagacgagaggagaaccccgctcgacatttacaacaagtttatcaagcggggctacgacgagtatcactccctgtcggtatgagaagtactacaacaagaggacgtcgcccatccctctggtctcaattacttcgtagtggtcttccctcattcagccggatatggcgacccagaagaacctgcagcttaaaaaaaagtacaggccttcgcgcatttttagctggtccgtttctgtcttctttagctccttcgttgacgctttaatgggtctgcagcatgtcaaggtcaagtccaaggtgccgtcactgccagctcgagtgaagaacagtcgcctcgccacaatctatcacagcctagcgcggtcatggtaccgaagccaagtaggccaccgcagccagtactcggtcgaacgcatgctcgcctttcgagactactgcaaccggacttcgatcactcgagtcgtcgcagtttgcttactgactccaatccctgccttgatagtgacttcgttgatcgattgcatcccgttgaggcctcccgaggacgggtggagagctaacaagacgctgtggatccggctgctgcttgaagcctttgcagttgcaatggggctcatctcgcaggttcgaggcgtcattgtgtctggcacagtctcgaacgtgggtgctgttgtgatctcggcagggacgagcgtctgctacgtcacaatctcgatagtggtcgcagcgtattgggaatttccagttccgtttgggttcgtgatttccgttgcccccgtcgtgtctttcttctgcttgtggacagttttggtcgtggggcctcgaacgctttatacgacgccactgctccgccagcaaatcaagtcacagctcattatcgtagcgactcaggggcttgttggagttctttatccggtttttagtactgtgtttaaccgcctttcgggggttcgacaagccgcgtttgtgctcgtcatgcccctcatcaagtacacgaccaagcagatcatcgctaacgctgccgcaagtctcaacgaatacgtcggccccgtcgtggtcttttccgtggacgtgttcaatgtcttctacgtcgcgatctgtatgcagtcgtctaagtccgtactgacaacgctggtcatggtggtggcagacggatttcacatgtttgtggcgcttcggaccattttccacctcgctaatgtcgtgaaaaagaggagaatagacgacgtctctaaaccgccacagatcgactacgttcgagacttgccacgcatggtacggaatgttttccttacgtcagctgcgacctatactcgaattagggtgtttgcacccttccctttatctctctcgaacgaaagtgttgcctttatcaatgcaattgggaaaagcaggcgggagacccacatttacgctacgtcgaagcctttggcaccccgacgcaacagactgaggtcggtgttaggcttacaaagtgctgggatctggcgtaaactagcgctaacaggaggtgcttccgccgccagcgtggcaccaaaagtccatcaaatagcccccgcaagtcccgtgtccaagcgaagttttggctcgttccaacagggaaaatatacctcgcgcaagacgtcgatctcccaaaagttggttaagctgatgcacgcgaatactacgattacgtcggacaaggccttgcgggcggctatgggccgtcgaggggttgaggaggctgcttgggagggacttcgcgcgcttttccacaccgaatatcttctcatggccgaatacgtagaagctgtgcttcccgtgttgtacgtggcctatctagcgcttatttatcacttgccagtggcaagattttaccctcataccgcttctctaagccccgaaaatttggttcggacggtggttagtgtcctgatgtacgccacagtcgagacggtcacgtttatcggcctattggccttgatgaggaagaaattcgggatgtcgccactgtaccagctcgcattcgtactggaaacacaggcgcacacgctgcagggccacttgttcgtctggtccatctacattctgcatctgccgctagtgcactacggtatggatctcagcttgggtttgtcgtgagtcatcacccattctaacgctatgacatggtgctgtacggactccaggtgtgcgtttgagttgattcttatcgcctttagttatcggttcaacaatccaaagaacgcatgtttgggtaatctgggcagatttacttaaccttttaactactttaaaaagtgtacagaatattttgctcgacgatgagaacttatcttaaaagtcgttaggagcctaagtgactgcaatttaaaaaaaagttataaaaatacgacaaactttaaaaacactggcagtccgagattgcatgcgaacagcgattgactgagtcaggcttgttgccgcccgcacttttcgagttcataggacatgggacatctagtaaaagtcaaacctgcacaggctcagctgcccacttcttgttccatggtagcgaaagctaaacagcaggcagtgagcacctggagccgaagtcaaattgggcaccgcagtgagtactcggtcgagcgcttgctcgcattcaaggatttctgccagcgcacttcgaccgcgcgtgtaattgctgtgtgcttcttcaccccgttgcctgcgctgtcagtggccattgcgatcgactgcattccgatgcgacctccgtccgatgggtggaataatcccggattctgggccagattgttttttaccgcgttctttatcgccgtggggctcagtttccaagtgaaggaggtgctcacagggaagataatctcgaatattggggttctcgtgatctcatttggcacatcgtcctgctacctattgatgatgtttacaattgcagtcacgtggaggttccccattccttacggatttgtggtctcggtggggccctacgtggtcattttctccattatcactgcgttccttattattggaccgaagattatggcacagtcaccggttctgcggcggcagattatgttgcagcttctcattgtggcgacgcagggggttctggccatcgtttatccgatttttggcgctatcttttatcgactgtcgggggcagagctgacagcttttatcatggtcatgccagtgatcaagttcatcacgaagcaaattatcgcggcagcagccaagcacttgaaagaatacgttggccccatcgtggtcttctcggtggatgttttcaacgtattttacgtcgctatttgtatgcaggcgtccacctccttagtgacaaccattttaatggtggcgtccgacagcttccacgttgttctagccattcgcgacacctttcgacctacgaaagggaacgatcgagtctccagtggaaatctccagaggtcaaggaactacctagagattttgccagaactggtacgagaggccttctacgaggctgcagcatcaatgtcactggtgaaatacattcgcgtgtgggcgccttttcctctgaagatgtcggacgagagcaagaaactattatccgacctcaagattatcggacgtggtgcaagagcgagcggaactagaaaatgtgcgactaatttaccctcgacccgggagtcgaccggagggttttcggcccgagtggacttaggaggaatttcttccaagattttgcattcgaagcacgacaagccgatgcaagtccccacgcggcaaattcgagtccttccggtagagagtggacgatccgtgtcaagcgcttcaagggctcaacacagtagcatgagctcaaactcaaggcaacatgcattgttccagcctcggagtgcaccttcagaaagttccaattatgcagaggtggcagtgcaggatgccctacagacgctttaccactctgagtacgtcctcatggcggagtacgtcgagtttgtactgccgatgctgtacgcgctgtacatttcagtgctttaccatctcccactggcgaagttctacccgtacacggtgtcgatgacaaaccagaagctcgtgtcgactgttgtgagtatttggcctattccaccatcgagttcgtgtcatttgtcattctcgtgatcctgttgaaaagaaagtttgggttctcgccgctttaccagttggcgtttgtgctggagacgcaggcgggggcgttgcaacgacacctcctcgtgtggactgtgtacattctccatcttacgctaatacactatggtacgttgggcaagatgacaattcggtggcctccgactaacttgtttcaatgagtacagggattgattttaacgcaaaatttcgatgagcggccctgtatcacagttgtctattgtagacacctccgacgttttagactttagaggaaagatcacagttgtggggatggcgcatcccattacgagtgatgggtcggtactcactacatcgcagccctgcaagtgctccttgaccaaatgccagcctaatcatcaccttcgctatcattagtgagacaagatcacgaagtgcatgaccgatgaccaccaaggtcgactgacctgaggtgaactgcaacagctccatttaaggaatttcaggaaagaatttgactcatcaaacagcgaacaccgctgctacattacgctacgcaacgtgagtccatgggaacttcgactaactccaagccgtcgaagcactcgtatcaaactcctcgggatggactgtactcgaaaatgatttccaggacatgggatcggagccagattggccgccgaagcgaatactccatcgagcggctacttgcgtttcgcgactactacgagcgcacttcaattcttcgtgcatttatggtgtgtgcgctcacccccatcccggccttgcttgtagctctaagtatcgactgcatccctttgaaggtgccatcggacggctggagagcgaactacgcagcttgggtcaggctgttcgtcatgatggctgcaatttcgctggttatgattgaacagatccgagatgttatcgtcagagggacgatatccaacgcaggggccgttaaagtcgcgctgggcactgctagttgctacgttgcagtgtccactggagtggcagcggcgtggaggtttccaatccccttcggattggtgctaatggtgtggccctacgtaattatcttctcgtcttggacagtgttggtgatcggccctcgactgctgctacagtcatcgctgttgcgtcagcagatcaaggctcagctgctgactgtggctacccagggcgtcgtagctgtggcttaccctctcttcagtgccgtcttcaaccgcctctctgatgcccctgatcaagtttttcactaaacaaatcattgcagattcagctcagagtctgtcgggcctattatcgtcttctccgtggacgtcgtcaaacgtctacttactacgtttcgatctgcatgcaatcggcgacgtccatcaccacggcggtacttttcgtcctcgtggatagttttcacgttgccgtggctattcgcaccatcttccgacaagcacgagctagtggccaagacgagtgctctggccaccattacttccgcgacttaccatccatagtgcgagcctcagttcaagagaccaaagctctaccgcctcacactaaacccattcgactattcgcaccgttcccgctccctctcacgaacgaaagcacaacttacacggctgagctggagaaactggctatggaggtagctgtcgctgctaacaggtccggtcaagcgttggattccaacggaaagctgacatccgagcgaacaagcaaaagtttgtcaagaaagtcgtcggtgcaaaggaagtcgatcccaaaaattacggttctacatcggcatcaagtggtgccgacaaaccgcgacccagcgccacctccacctctgagaccggtccgactgtcgaaagtggcgtggaaactgagtcaaagccggtctcgaattatgtccagcaaagataaaatattggctacacctaagccgaagccgtcgtatcagcacgtgtaggacgaactgcaggcgctcttccactccgagtacgtgctcatggccaagtacattgattttatgctgccaacgctctacgcgttctacctcgggattaatttccatcttccggtggccgcgtactacccagacacagcatccttgtcgctttacaaacactcgtgagcatcttcgcgtttgcatcggccgagttcatcgcttttggctgacttttggtcctactcaagcaaaagttcggcttctcgccgctttaccaggtggccttcgtgctggagacggaggttcgcacgttgcaaggccatttgttcgtgtgggccccgttcattttgcagatgacactggcccattatggtttgtgggtttcgatgctgttcaattcattaggtgaaaaatctaacattctccttcatgcatgcacaggggtggacttcacatttccgtttctacatttctgatttggctttgtctgcggtctcttttccctcttgatgccgtttgttatggcattatgatttgaaaaaagtaaataaaaaataatgagcccaaaaataattctcctaacggcggatatagtagtcttcatttatacttagaggcgaaaaatatagccaagagccatacaacaaaaggccatagcaccactgcaccagcatgactcctgggcataatgtgcagctgggaccctcgatgcctacgacagggatccggcatcctgcgaggccaaggtgttttgagctgttgagaagggtccacgatgtggtactgcgcacatacaagcaaataacacgaacgtggctccaagtccaaatcgccaatcgacaacagtactccgtcgagcgcactctcgccttccgcgattactgccaacgaacgtcgcgcgcccgagtgttcgccgtgtgtctgttgaccccagcgccggcttttgtcgtaatgttactgattgagtgtctcccgctcaaatccccggaagaaggctggagagcgaacaaggtcatgtgggtgcgaatgttaatctcaagtgtgtttgttgcaggtgggatagtgttcttaggcaaggcactaatcagtgaagccccgatctcgaccggccaagcgattggcatcgcctttgtgtccgcgatttgttacactggaatgggtgtgctgctggctgctgcgtggaagtatcctgccccctttggtctcgtgctgatggtcagtcctttcgtgaccatcattatgtcttggttcctcatttgtatcggcgctcaagcgctgaaaaccaacaaaaagcttcagaagcagttgatcggccacacgatcgcccagtcagcgcagacgctgctagtggtggcgtacccgacgtttaacgcaatatttctgcagctcgacagcgtgcagcaagcgattttcacgttcgtgctgccagtcatcaagttttctgccaagcagatcacggctagagtgtcggcacacatccaggacttcctgggagtaacgatcgtgttttcggtggacgtcttcaacgttctctacgtggccatttgcatgcaaaccgctcgatctttgctcacgacggtgctgctcatgtccttcgacacactccacaacattctagcgcttcgcgcaatttatcaccacacgaaaaccagcaaaactgactctgagctcggccactccaactgcgtagagaaggtggtatcgatgctagaagcgctcaacccgcaaacggggtcctattctggagtgattcgcgtatttggaccctacaaacttccactgtcggctcaaagtaagactctgctcgacactcttgaacagaagctgcgtgtccaaaacgtagcgaataccgcaacgaaatccgtaacaactcgctcgatacgaagcttttcagcacgaggcatcggcccgcgtattcaacaagtttcgcctctcagtttcgggcagtcgtcaaggtttgcgattaaagcagattttctgcctagttccaattggagtgcagtcgttgtccctgagcctttgagacgtagttcagggccgcggagctgtcaacacacgacggcacaacgtccatcccaacgcgcgaggaggccacgccgaacaaacattacgcgaacgagtgaggaagaagcgattgcagagaggctgcaggttctcttccattgcgagtacgtcatcttaaccgagtatgtcgagtgcacactgccgatattttatgcagtctatctcgctgggctttaccacctgccgactgcagcctactacccctttaccagatcgatgaccccagccaaaatggcgtcgacgctcgtccagcttgtcatctacggatttttcgagtttggatctttggtgggggtgtacttgctgctcaagcagcgcatgggcttttccccagcctaccaacttgcgtttgtgctagagacgcacgtggtgctgctccagagtctgcttttcatttggatcatctttattgcacagctttcactggttcatggaggtacgcagttgaataagcggaaagggctgcaagtttcgattcgctgatgtttttgtctattgtgcaggtgtagattttgatgccccatttaaataattagaggcaaaatgcacacttggcagtcaacaaggtaaaaaccgacaaggagtttctacttctgtagttaatatttgtcttgggctacgaatagcaacgagatctactatatatattgaactggacagtgtcgtcacgaagaccgcagaggcaattgcctattgccgtcttccagtgctcaatgcgaaaggacccagtgccacgatggtccaccagcgaaaaatccagccgtttgaggtatcttccttgccgactacagatcgagaaggccccgtgcaagtgttcttggaaacgtaccgagagtgggtagtgctttggtatcgcagtcagatcgggaacaggcagcattattctgtcgagcgcatgctggcgttccgagactaccacgatcgcacttggctcgctcgtgtcgttggtgtctgcgttttgtatccaatcccagcgttcctcgttattttcctgatcgagtgcatcccgctggcagaccccgctgacgggtgggcggccaactggacattgtggattcgcatgcttatttctgctttcgtggtctcgcttggtttgctattccaattcaaagctgcgattgaacccggagttatctcaaagtcgcggactatcggggttgctattgccgctgcaattttctacacaggcctctcgctcggacttgcggttacttggaaatttccgattccgttcggtttagtcgtgttggcgcttccgtacgagagcttcatcaatggattattccttttcagtattggattctatgctataatggagaatgcgaagctgcggggccaggtttaagcccactttcctgtagcagctgcgcaactcttgctggtagctgtgtatcctcttttcagcgctgtgtttgttcatctgtcagcgtcccagcaagctctgtttgtcatggtgttgcccacgctgaagtttgtgctgaagcagatgattgctcgtgtttccacgcatttacacgagcgagtcgggagtctcatcgtgttcaccgtcgacgtcttcaacgtcatctatgtctccgtgtgcatgcagacagcgcagtcggtgctcacaaccattttgctcatggcttccgacgttttccacattctgctggcgctcaggaccatttactacgacaccagcgctattcacgagtaccgactgcgggccagtgtgatctggaaattgagatatccaatcaactacctggaaggaatgccggccatgctgcggtcggcaattgacgaggcgcggatatcaaaggctccgccatccgaggcgattcgcgcatatgcgccatataaactctccgtgtcatccgaaagtacgctcttcttgacagaattggcggaaaaacgtggagaaaaaatgatcactgcagaagttatcgctggatcgaagaaatctggcccagctctagccatgatcccagtgcaggtacatgattattcgagtctcaaactttttcgatctcgcgttgtgtttgaaagccgacaaaattccaagatgccaccccaaaacttccgggtcgagccgcccgcctcaataacgcgagcaccttcgctacgtaagaagtcgttgagcgtatcgcatgcgtcggctcattctctggtgatcaatctacggcgggcatctctcgttcccctcggcgctccgatctgtgagttaataactaccgaggaagcagccaaagaggggctgcaggcgctcttccactgcgagtatgtcattctaactgaatacgtcgagtgcgcgctgccattgctctacgccgtctacctcgctgggttgttccacgtgcctacagctgcttactatccacatacacgcgacgtatctgctgaaaagatgcagtcaacgctgattcagctcgttgtgtacggctcgctcgagtttggctccttcgtcggcatcttcttcatgttgaagcgaagatttgggtactcgccgcttttccagctggctttcgtgctggagacggaggcgatgacgctgcaaagtctactgttcgcctgggtcgtgtttgcgctcccgctcactctggttcattacggtaagtaaagtgattttttcggcagtgcctagctctgctggggtgctcatatatgtatttgtatcttgcaggtgtcgacattaccgccctcatagagtaggagagtgaagtttgggaacactcagatcaagtgtcaggaaggtataaagtatcggttggcttgagccagcttacgctcaaatttgatgaaggcggtgaaggtatgtatactgctgtggcccatgttgaatgtgggtgtgtagcgcagcaatgggcacatgtgagtcagagggtctcggctggtatgcggatggcacgcgctctccaccaacacgcaaaattatttgcactaggcgacgagaaccgtttcaagcaagccaggaaaggttcagtgcctcagctccgatgcgctgcaatactctagccctccgactacaagctgccggctggatccgctcatataaatgtagccatttgctgcctcgttctactttttaggttctattttttggtagtcgcacggatgtctcggcttgctctgttggtgagtgcgggggggcaagcccgaagatgcaggccaatggtgtcagccgctggatggggcgacgaagctctggcagagagaaggagagcagttgcagtcggcgggaaggcgttaaaaggcgccaaagtttggctgctggcctttcagacgggtggagcgcgcgtgtccggcgcagcgcaaacacatttgccaaccaaccgcttcctgcggcgcctgtggtcggagccgggagcgcgctctcaagccagatttaggtggtggcagctcgtgaatcatgcgcgcgcaccgtctgagcccttcttccactctctctttcctgcggctgaaacggatacggctctagatacgcgcagctcttctagctccacaacgtccgccgtagcgtgacgttcgcgtcccagctcacaatcgattctgcggccaacatccgacaacccgcaacagacttgagccatgtccacctcgcacctccgattccgacgaaagctcggcgacgcgctctacggagaagtcatggagtgcgagctccaccactccgcgccgcactacccgaaccttcccccgaatgatccactcggcgctcctggagcgccgagtcgcccacctgctcgcctccagcggcggccaccgcaacgtcgtggcctcctacttccacttccaggagcaccagtgcctctacctcgtcggcgagttctgcaacgacggagacctgtacacgcacctcacctcgcacacgcgcaacggcgtcatggacgagcaaagctccgtccacgtcatgacgcagatcttccacggcgtcgactacctgcaccgcgtgctcggcatcgcgcaccgagacctgtcgctcgagaacgtgctgctgcacgacggcgagtgcaagatctcggacttcggcctgtcggtggacgccgcgacgcgctgcaaggcccgcgtgggcaaggagtactacatggcgccggaggtggtggcaggcaagacgaacgacccagtgaaggcggacatttggtcgctgggcatcatgtggttcatcctgctcacgggctccccactctgttgtgaagtgcgctcgatcctgtatggatgcacaccgcacgggaaaatgaagactgaatatattgatgttagctgctcatctctctcgagctccttccaaccgtcgttgactagctcctcaacttcctgtgcttgactgtcttggtttctggccagttcattgcagacccatgagcgcttgaccgtcgctggctgcgactccagctggcgactccttcgccgctcttcgccgtgactccgatatgtattccaacacgcctcccacgaagctgaggcttcgtaccatggccatctccgagtcgaactagctctcgtaagcgtcaccaacgctgattagcccgagcaactccttgaggcgtttcttgtcaagtggcttcgtgaaggtgtctgctggattcacctctcctcgcactttgtgcaagtcaattgcacccttctgcacctgttcccgaacgaagtgccagcgcagctcgatgtggcgtgttcgacggctgtatgtcggatccgtagccattacgtgagctgcctgattatcaattccgatgcgaagccgcacctcacgatgcggaagcatctcctggaggatgttactttctgccacagcctccatagtcgcctcacacgcggcaacgtattcggcctcggccgtcgatagagcaacgatagactggcgcctggacatccaggaaactgcaccaccagccagcacaaacacgaaacccgtcgtgctgcgtcgagtgtctgggtcgttggcccaatcgctgtcgcagaacccttccaacactacgttctgtgatccttgtgctcgccgctcatacgtaattccataactttgcgtaccagccaggtaacgcagcgtcctcttcaacgttccgacatgcttcgctgagggcttggctacaaatcgactcaactgtccgagcgtaaatgccaaatccggcctcgtgcacgttgcgagatacatcaacatgccgacgccctctcgataggcgaagctggtgtcacactcctcaccttctgtcagcgctacaagtcgagtatttacctccatgggattgcccacaggatgcgcgtcttcgtatccaaatttctcgagaatctcacgacagtacttgaactgcctgatagtgatactgtgcgcagactgctcaacttcgactccaaggtattgagtcagcaacccctgatctttgattccgtactcgctgtccagctctgcaaagagctccagcttgatcttctcgctgttcgtcgctacaagtatgtcgtcaacatacaccagtacgtaggcgatcgctccgtcctcaaaccagtagtacaagcacggttcggttagcgagcgttggtatcctcgacgcagtagccactcattcaattctgtattccactctcggccagactgtcgaagtccatagagagctttgagcaccacatacttgtgtccaggtacacgacacggatacccctcaatcgaacttaggtactgacggatgcccagtggtgcgttcaagtaggcagtgttgacatcaccaccgtaaacttgcagatttaactctgctgccagcgccagaagcagcctgaacgatgacatccttgccaccggtgcaaacgtctcgcggaagtcgatccctggtcgctgatggttcccgagagccacgatgcgcgccttgaacctgatcacaaagccctgttgatcagctttgattgaatagacccacatcgtgttgatggtcttcgcatcttctggaacctcggtgcttggtatctcttcgatgaccccttttgcctccagtgccgcgacctcctccatctcccccatgagccagaactctgcgaacttcgacctcacggccctgcgatggttatgagggatgatgacatcactggctcgtattggcttgccgttcttgtcgagcacgcgcgcggttttctgcaagacgttcaccacgtagtcgtccagatactgtggacgtcggcgctcgtgggcttcgcgaaggcctgtgcgtttgcgcttcgtttccattttgtcagcgctgcgctcaacgcgctcctctttagatggggtttcgtcacgatgggtacgtttacccgtttgctgtggttgctgcacatttgcactaacttcatggtgagcatcttcgtgttctgctccagtgccagcgagaagtacgtcttcgtgcctgaccccacggtcgacacctacagtactagccaccgtaatatcctcatcgccctctgctaagtcgtcttcgcggtcaatatcagcatctcgtccatccaatgcagacccatactccccgacaagtgaatcggacccatcacatgactcggcatcgtttcgttgcgaggaccaactctcatacgagggtagcggggattgcggtaatggtatctgagcaggtaatgggatctgtgagtgagggctttcacactcatcggctaatccaggttcttctgtgctgcggttcctcgctgctaacagtacactagatgccgaattctctgctcgtggaacgctagaggatagcgatacgacgtgggaaccactccgtgcaggctttggtaattcgcttggcaacactgccgttataccttccacctcagagccgttcacagcacttcctgcttcgccactgacgtcagcatcgtttcccagaccagcttcagtgtcaccttcgttatccagcgcagcgtcagtgtcgttttcagcgttgttcttctctttcgactcactttcatcacctcccacaagactattggtgttgattgacacctttggcttgtcttgatgagtcgctccagcctgaactacgcttccttcgcgcaaagggctaggcctcaacgccgcagttgcagtcggcatactctcgtcgctggtggcagaagctgcattgtcagtgccacttaatacatttgatgctctctcgaagtgcaaggactcaagatcgtcctcagcactcaagctagctgcgtgtcggtcacgatacatcacattttctgccactcgaatatccaccacaaacttcgcggtgtgttcactcgggaagtacactttgcaaccgacgacatcttctgcataacccaacacgaatcccaacttcgcgtttgcatcgtgcttgcgtcatcccggcgcaaccggaacgtggacatacgccaaagccccaaacgtgcggacgtgatggagatcaggtttaactccaaacatttgctcatacgggatggcctgtgtgcctttgttgaagactctgttcttgatgtagacagcgttgcgaagtgcttccggccacaatgctcgtgggaatcccgcgtggtgcatcatcgctttagtcatctccactaaggactggtgggtgcgctcacaaagatttagctgagaactcttagggccgactttgatgtgctcaattcctttgctggcataccacttctctatttccgagttcacgaactcgcctcccttgtcggtaagcatctgctgcacaagatacttaactttcactccttccccattgttctcacggcgcccagcctgtctttcagcccacagcacgtactctttgatgtggtcatttaccacgtcgctcgatttcccagtcagcatgtgcactgtgacgaatctcgagaatccatccatgatcaccagcactgcctcatatcgagtcccgtttccctgacttgggatgagaaggtctgcatagaccacttgatttggtttgaacgtctcgcggtcgagcttcttccagtgcgcctgcttcttttgtttaccaacgtggcaagcatcacacgtttcttgctggcgctcggtcagcatcatgccgcgcactccaccattgtctttaggtactgttgacatgtatggccgagtctgcggtgccaagtggtcaatgaagccactccctcggctgcagtaaagttgcatagtgccacagtttccagcttggacacacgatccttcgtagcacgcgtggcgcagaacccccatgttgcatcttgtggcgtggcaatggctacaagttgtccatccagtagtacatgaaagctctgtgttgcacgatccaagtcgagttcgaagccttgttcacacgcaagccctggtgagaagagtccgctgtctgcgcctggtacgtagagaacgtcatcgatgtaaactaccatttgagttccgtccacttccgtaaccagcgccaccgttcccactccagaaacccgagaagccagactcggagttactccacggatactttggcttccatgagtgtcctctttgaaggatatgtagttcgcgcgatcaccagtcacgtgcgcatttgacgcagtatcgaaataccaccactgctcgctgctgctttggtcagccacttggggttcactaaccactcccacttcctggtcaaggtcacctacgggaagtggatggttatcaggttcagccgtcgcagcggctgtgtttgaccgagcttccagtgcacccgccacgactcctgcttcttcaatgcacttggtgtctggaggcgcactaagtttctggcgaattgtgcagttgcctcgcggctttcgcttctgctcgatctctttggcatcagcgccgctctgtttcttcgcgttctccgggcagtagccctcaggtgctccgtgctaccacaggtgtagcactttcgaggctgcttgtagctcgaatgtccttgctggtgggtatcaccacgacctctgcccccattcttgagaccaccactcttctggtgctcgcgctttcccccacctcgcttgctcctgaactcgtttttctcgaagctgcagctcgaatcagttcacgaaccttggtgtgtgtgtgtgtacacacttgtgtctgcacaatagcgaatggacgccttcaacgtctcaaactcggcttgttctggcaagctctccaagagcatctccaccatgtcgatgtcgtcgacggtgtactgcaagctggccagctccgttcgaacgttgaacattttgcacaggtgcaggtttgcatcaccaccgggggtgagcttcatactccagagctcatccaccaagcgacgtatattgtgcacctttactgtcttgttgatcttgttctcgaacaagtcgcacaatgcatcccacatgtcggaacctgtgtccttgtcccaaatttgatgcaggatctctgacggtaccgacgtaccgatcatcctcatgatcttgttctgcttcttagtgaagtccgcctccttgtcatggtcgcccttgcactccacgatctcgagcagctcgttctccccgaagacggccgtcatggcccacttgtacgtctgccagtccttcccatcccagttcttgggaatgccttctgcggtgtatttcatcggtttcgccatcttaggacccttagcagtggcgcgttccgccaggaagttccgtaagttgggctcagtaccctgttgtgaagtgcactcgatcctgtatgggtgcacaccgcacgggaaaatgaagactgaatatattgatgttagctgctcatctctctcgagctccttccaaccgtacgggcgaagcccgccgactcatgcaacggctatatctgcgttgactagctcctcaacttcctgtgcttaactgtcttggtttctggccagttcattgcagacccatgagcgcttgaccgtcgctggctgcgactccagctggcgactccttcgccgctcttcgccgtgactccgatatgtattccaacacactcatctcggtcgcctcagaacgcaacaaagctttcgtggcgttggctcagtgtggggtcacagccgtcttcgagtcgtggaaggtctgtgacaagctgtcggtggaagtcatggacctcatctcgaagatgctgagtattgaccctagcgagagggtttctcttgaagagatcttcgagcacccgtgtctgaagactggacgcgcatgctagcccaaactatcggcatacttgcatataacgatgtaaatggcaagacgccactatcaattttaagcttaaaaataattaaactttataattgttgactaacagtaacctcagcgatgataatttatcggtagatggtcgaccgtagtcgattgatactaatctttgcaagttggttgtgtgtttgtcggcggtggggtggattatggagtggaccaagaccggtttaagtggccttctatttgagcttaattaactgacctatagaagccttgatatgtagtgagtggagtggaccaagaccgtcatcatggaactgtaataatgtgctcctagttccgcgtcttcgagttcagcaactttctgtggatacctgccaccttctcgctctacgagctgacagggatgagtaagccagggctttagcggcgtgagcgatggagtttcttcgcctagattgttttgattgggagagggaactaacagggccatatttgatttccgatgccaacagaaacgcaactcgttgtggttggcgaaatagtgaaattggagggtgcagtctgtccattctatcgggtgttggtaattaagcgcggctagatccgcgataacagttgccactgttttcttcgtcctacgttctggctgcacagtcactgtccagccaaacgaaggtgtcatgattcgctagtgttcacttcaacttcatcctccaatcggatccgaaccatgggaacgccggccagttcaacctgccagcggatctttaggagctagtcggcttcgagacagataaactcagttgaattcgaccaccagtatcatcagtattgcaatcgaccagagctcagtcgtgatcccccgcacaactggtcagctcgttttctgaggattcccgagcagtgctaaccccaacgcgtgtgtgccttacacgttctcgagcgcgcgtcatcgacgaaacactgacaggaataagcgagcaacgctgtcgccaccaaagccggagcagacagagaaatcgaattccctagctgtgacgccgccaacgtcgcaactacagctcaacaccgcggtaggtgctggtgaatgaatatgtggctcgtgtggcccagcgctgcgtgctcagcgggaatatactagccgacttggttgatgcgtagctgacatcttcctcgactgcactcaggacaagcaattgactgtgtagctaacatctcagcaatacgaaaggtgcggctctcagaggctggtaggctggaaggaagcgcgttcatatcgcagttcatgccaggattccaccggcgcttatcgaaaccactgccgtatccatcaaaaaggacgagttgcgaaatcgcaatctccatccgtttatttcccgagcgcatgcacggtccgacgtattcgtcgctcacaaccgattccgctgcttctagtgaacgttgatcaactccttggtaggtcctattcgcaatgtccacctcgcacctccgattccgacgaaagctcggcgacgcgctctacggagaagtcatggagtgcgagctccaccactccgcgccgcactacccgaaccttcccccgaatgatccactcggcgctccaggagcgccgagtcgcccacctgctcgcctccagcggcggccaccgcaacgtcgtggcctcctacttccacttccaggagcaccagtgcctctacctcgtcggcgagttctgcaacgacggagacctgtacacgcacctcacctcgcacacgcgcaacggcgtcatggacgagcaaagctccgtccacgtcatgacgcagatcttccacggcatcgactacctgcaccgcgtgctcggcatcgcgcaccgagacctgtcgctcgagaacgtgctgctgcacgacggcgagtgcaagatctcggacttcggcctgtcggtggacgccgcgacgcgctgcaaggcccgcgtgggcaaggagtactacatggcgccggaggtggtggcaggcaagacaaacgacccacatttggtcatttggtcgctgggcgtcatgtggttcatcctgctcacaggcacccctctggttccgctcgcttctccgaaggttgactcgttcctcgcgtttcaacgctgtggcctcaccatcgtcttcgaatcctggggactcgcttcaaagttgtcgccgtgggctgtcgacctcctgtctcgaatgttgactgttaacccgagcaagcggatctcgctcaaggagatcttaactcgcctctcatctcagtaatcaccattgtcagatatcttctcaataataatgttgtatgtcaattggcgttttccgttcgttgtcgacgcatttgattcaaatgtcaaggaatgacgctttgaacgtatcgcccgctctgcgttacaagggcgaaccattcgtttgttttctcgctttgttcacagtgcagcgtcaccaagtcgtggacctccctcaccatggtcgcggtgccgcaaacgtacaagcgcgattcgtgggagctagccatgagcgaggagatctgctgccagtgctggtcgaccaggttctggaccaccttgtgaggtttgtcggcatcgtcgtggaaagcaacgcgcagatcaatcacgcctttcttcttcagatccaggagctcggactcgaacagcagcgagtcttggttcgagcatccgagaagaaccagattcttggcatgtgagtggtggtgcgacgacttcctcgatagcagtgaggagaaggaggaaaaccgatcagtttcgagctgccgctgcatgagcagcgctcggaaagggacgataccgaccccttcggcgatcatcaacatcggcgcagaccgatcggatggcgtagagaaggccgactcggagaagaagccgcgcagaagtggcgtcgcgggcgtgaagacgttcgtctccttgaggtgctcgtgcgatatgggtcttgtgaataaatactgccaattcgatagcacgagaccgtcggtgtcgtcataatctcctactggcacgacgatttcgaactcgcctgcgctttggacaggggatgtggcgatcaaatggaagcggggtttgatcagaggcgtgatgtttatcagcacttcgaacggaatgcgtagacttggcgcaagctccaatatctttaggacaccgcctttctcgagcgtaaagtgccgtctgaacgcagccgctccgtctgtagacgacagcatctcgagcaattcgtgctccttggggaccgtcacgaagcctgaggctagtcggacgaactctcgcgataccgtccgtaactcgagaaagtttcttagtaatgttcggacagtgcaaatacgcgggaacggaagcgcttctcctgcttgctgcacgagcgcagtcattgagacgtcggggtctttgctttgcactaaaatctcgatgtatgcatccagatcaaacccgagcaaccgggcgatactatcgacaatttctggcgcgttgggagggaagaagccgaacgaatccgctgcctcgaaggtgactgccgagtcttcaatcgacagacggagaagagccaaacgcttgaagtcttcaacccccgaatgaggcaatatagacagcgttttcaatcggaaccacgactgatgaacactgtcaccgccttgtcttccacctgtgcccgtgtagctgaagttgtctggtaggaagctggccttccgagcttcttcggagcgttcgttagccaaaaatcggcagcgaaagcgcagtcgaacggggcggccgtccagatccaacacggtcagcgtcaatggagcaactggttggtcttcaaagtattcgcgcatcgaagcgccttggcgtccggagcttcgggcggttgcgctgctgcttctcctcaaaatggaccctcggcgctgctgctggcgcccctgtgatcgagtcgcgagcgacggtcctgatgggacgctggagacgctaaacctgcgaggggtggtcaactgggctgcacttcctgcactaattagaggtcgaggagcgactttcttggccgacgcggccatgggagggacgctatcaccaagttcagccgagtaatgcgccagttgttgaagcagttgagcctcccacttggcaaacgtagctgaaatatcgttcgagacgtcaccgagtcctagtggacacagtcgcgtcgcgcccagagcatgcaaccgcgcgtcgatcagcttccccatggcgttgtaagtgaggtacgtggagttgcccaccccgaaaaccgcgtactggaggcgagcgaaggcttttttgcgcttgttccggaacaaatgccgccaattgaggttgaagcctgaatgggacgagtgcggcacgtttgagcgggatgatgaggctggtgctgttgatgacgagtgcgagaagctcgagcgtgacgaagtcgcagctgtgggggaagacatggggctgacacggttggagcgtgtagctggtcctcctcctcctgggacgacggcggtcatcggagtagtagaatctccgtcgggagaagaagacactatggggtctgcagtgggtcctttgctagagtcggtagccgcacgcagccactgcacgaacatttcagcattgggtgctgggcctgcgtagtgggtcgacaccacgaagactgtagcgcgggaaggcgagtagtacgagtccagttcgtcgtcgtcaaagtgggtcgggtcgaactcgttcatctccttcagcaatacaacgactccacgcttcgaggccttgttagcgagatcagacgccagctccttggctgttcctgtacgagatccgaagaaaacgtcgaggtgggtcatgttggaagcggcgacttggtgagtccaccagaaccgccgccgacggggagctgaggtctccgagctgtcatcaccgctgcccattgtatggatgagaggcactattcagcaagtttagcgctgagctgtttctggcaggagcctcaagtgagcgattgcgaaccagacagcctacatacactaaagataggatctagtctcgctagtgtttctcgaaatcagatttatcctttgtctagccagtcagctacggataggggcagtggaacgtcaaccatcgccataaagaaggacgaatactagaagcattcccttatttaaaaataatgtcaatacacttacgacaatattttgtacgggccattgtattattatgttgcatagatactcctaatagggggagtcgaacatctcaaaaacgccaaaaataatgagcaaaaccgagccagaattctgagcagtaaagtgtcgaaaagatgtcgatccctccatttttcggacttagtcgagtggagggaacttttccgccatctgacccactacagatcccgaccagtttcttcaacaaatgctggtgtgtaactttgtagggaatactgattatgcaatagacatgcgataccaaagtgcatactgagaacaaggtaatttgatgtagccctttctaacagcattgaatagctagagcgtgtatcacaggatattgtctataaggataatttggaggtatttgtggaggagggaacaaagaagggaattgcttatctctgaaactagggctccgcgaaggctgggataggatgtttttggtataatcgctttctattattatgaggttttttacgaaccacgggcatctcctgcgcctgcttcgcagccgcagcgtctgcccggtaattcacctcaaaactgtagatagtgcttatacacagtgataaaacgaaccttgctcgagatccgtttgtagcttgtagaaagtgaaaatgtttacccttgtatgcttctgcagcagttcgtccatcattcactttacttcactcctactattcgatatatgctactgactcataccggttcaatctgcccacgcatataaaccttttggagggcccagtgcagcaccgcggccgtaccggtgtaatgggttttctaccagttcagcttgcccacgcatataaaccttttggagggcccaccggggccacaccggtttcaggacaatgtaccagttaggtgtcaagagcggtcaccttttgactcagcgtaccacggatataatcatgtttggtctgcgatagcagcactaacgttgcttcctatcccagtataagcagctcatttcagagataagccacctccggaggcggcttgtttcagagttaagcaaaacgctgtcgagattgtgagcacggccaagctcaaaacttgagcacgtttttggcaatgttcgactcccccctaatatcatattaaagctttcgcatgacgcaaaattatcatagatcacaaaaagcacccgccaaaagtgcaatattctttattttaagttacaacatacaatattcatttttaataagagaccgcgtcaaaagaaatgatgcttacgaacctaagtattgtgcctttcggtcattttgtcgagtcctacgtagggctttggaggtcagttaatctgaggttggaggtctataaatctgagatgcaaatctcggacgtgtccgatgagcggtctcccggagtctctccgttcaatggactccggttggagtccaagccaagcaagttttgtttagggaagcaagcaatgccggaacccgcgaaggcgaagagcgaagactggagtgtttaacgtatcgactgcatcgtgtttccctaagtttattctgcgtttgacatacgccgtattagagtcagctcgtatgaaagtcctgccacaagacttggcaggagtccttcgtaagacctcaaaccccgaatgccgtgaaaatgggcgacattcgggctttcggctgtttgtaggacctgcgcaagtgcttccatcggactacaccttttcaacttcaaaacggcaaattgtaagttcaaaacagcaaaacgtaaagtcaaaactgcagaccttgcgaaaatcataatcgaagctgtatcgcctttgacggggaatactcgggtacggtgggtggcgcgaagtgcttcgcgccaaaactaatggaccgagacgctttctgtacttgtgccgatgcagtgcctcgggctccagtctcccattctgcaatttgcgcccccacagcacagtctcccccaacacgcccaccacaccgcagcgctatgatctacgacgacgacactattctgcgcgttctccgcgccgcccgtgccggccaagaccggcaggatgtggctgccaagaacgacgtcagcatgcgcaccgcgtacaagtgggtctccgccgcgcgggacaacgatacgtggaatgtgtcgccgcgtaaaccgcgtggtgggaggcgcaacgcgaaggtttccgacacccacgtggactacctactaggcctactggacgagaactgctacctgaccctaaacgagatggtcgacgcgctagaagctcagtttgggctacacgtatcgcgccaaaccgtcaagcaccacatcggcggccgcatgtacacggtgaagcaaacgcatcaagacaacgactaccgcaacctgccccacaacaagatccttcgacgcgactacgtagtcaacctgattgcctacaaagctgaaggtaagaaaatattttatgttgacgaaactaactttaacttgtggtgttctcgtcgacgtggccgcagcttgaaaggcaagcgtgctgtcgataagaacaccgcgagcaaagggtcaaacatccacgtcattgcgtgcatctctgaggacgggttggcgtactcggagaagcgctttggctcctatacgtcggacgagtgcaacaagttcattcggcggctgctgaggcacatcggtcagaccacgcccctcgacaacatcgtgcccgtctgtgataatgcgccctgtcacacaagcatcgaggaggtgttcgacgaagaagagttcgcacccgccaagctgctgcgcctggggccctactcgccaatgctcaatccgattgagaactgtttttccactttcaagtccatggtcaagtgcttcctggcgcgccaccgccaagccatcctccaagtgccgcctcatctcacgatcaagcagcaccgcgaagggtacctcaagatggcggcagatctacttgtgggtgaggcaatcactccctacatctgctacaagtgcacgttgcacacgatgaagttccatgcgagagccatgccagttggcgagtaaccgcaaaaataaaatttcgcgtcagcggctgtttaggctttgcagttttgactttacgttttgctgttttgaacttacaatttgccgttttgaagttgaataggtgtagcaattcttggtcctaattccctacgagggacctgctaatctgctccgataacctagccccatcttagtaggtagctgttttacacgtccgattcgccaaaacaactgaaaagcacaatacggatcgcgatttaaccgcatacatcgacaggtgtcttgtgcgtcttttaagctattgagcacttcaaaatgttgagaactcgtgaagtgacaccggtgtaaacaacttatctcaatttccggacccccccccccaatcccggattttgtaaggggcgtgtgacctcactatttattcattttttcgtgctgtacattattggaaagctagtgataaaagcaagcgaattaacgtaatttccgctttctacgagtgattttcactttccaatttttaaagtccgattaggtacgaaatttgattggtcaactctaaacgcgattatctttaaaactccaaatggttcgtaagcctccttttgtgtgacgcggtctcgttatatcatataaagcacgcggcataatgtgttagcctctcctctacaggccaaaagcgtaccggtagacaggatccacgcatacatgtatgttttggcgaaaattagtttatatggaagtttgtatcgaagtccatgtggtattcataaacggatctctgggatttcacataaaagcaaccacgatttgtagtacttccactgcggcatatcattttcgtactgaaaactaagcgaaatctaacctgcatctttgctttgtctacgagaccgttgaacttcaggaaacgtagacaatgaagttagacgcttcagctatcgtacaaactttaaaatactacacaagtccctttgtagcttgcaaagtctcatgttgaagctgcgcataccggtatccacattggagaggaaaggttaagaaaaaacttatgaaaagattaaaatcaatctgtgcgaaaagcagcgacattttttacaattttggtggtagcattttcacctctcttggcaagtgtttctttttacttttgccatctgcggtattgcaatagttggtgaatacttgtatttttgtgagagccacttggaatatctagttagataataaatccgccgatttactataaccgacctccgaatcagactgacataccttgattaatattcaaaactaacagcaaaagggactggcagaatcgagttatctgcatcgatttcaatctgctgatcagcccatttagccaaagccggtcgattggcttgcttttcagcaggaatgttcgacgtgcaaccggcgttcagtctgcaagacaacaatcgttgtagttgatatattaaatttcagtgagctcgtggtttttttagagcggttacgcctagactaggtatggatctatacccaaatctgggttacaattactatgctaggacacttaggtaggaaagagagccggtagttggcagggtccaagtcggatgggaaggcgggatacaagctaacatagtcgaatttgcttggtaaccacacacttggcccttagtatcaggaccagtattggtccatacgtaaatcaagtgatttgcccccacacacgtggcggactgctagatagcttggccagcagctcgtgcccccccccccatctccctaagtccccgccatgttggagcaacaggctcaaagtgcttcaagtcgatgtcgtcaattgcaggcaggtaccgtaggctagaaacgcaaactccagcagtggcaaaggcctctctcactctaaaatatacctcctcggtgaacaacctacctccccactggactcgcctccgcaacagattaagaggcttgtcagcagcatgaccaaaagctcaacgacagtgcaagagaagcccaagtccatgttcggcaagtagaagttcatcattctgactgcgctgtagaattaaggtagctcgctcgtgacgccaggcacatccatcgcgcagaagcctgccgccactggcccaatacgcagtgagaagggagtgctgtaacttgacgacaaacagtctgcgggagtaaaccagcctgacgcggaccaaatcgtacttgatttggacacacacacacacacggtacttccgatacaccgcccacgccggcggcgttcagggagaccatgatggtgtggtgtagttgaacgcacaaagttagtccttgccacagacacaacaatcgccaagcaagtcggcgtttatcggcctgagctaggttgttcccagcggttcggccctcccgggacagcagtgatggtcctcgccaaggccaggcaaccaagccagtcaattgtccttccgcaagtcagctgagctcgctgaccccgttcccagaaccccgtgctctccactaaaggatggacgacggcgcgcgagtgcttttacgggtcgtcgagagcaacagcttctcgactgaaagagttacggcacccgggctgtccggcgtaccggctcgatggcttcggcgagacttgttcctagcgcactcggcgggattgctgggatcccggttaggagtaccgtgaatgctctcaacttgaagcaccacaccgcggtcaatctgagtcacatactcttcaccaagttttcgcatggcactataccacaaaggagactccagaggtggaagcagcagcagtttaagtgacgatgatgccttggaagaactttaaacagatcatctggtcttttttggtctcgagtgactgaaggggccataacagaaacctaaaaaaaagtttaatcactgaaaaccggtttatcattacatacaggcgaaatatctattaattaactttcgcaggtcaaatgatttttcaatgccatgccatagtaaacctatttgtacaacgagcaggtcgtgtaccgcaagacgaaggagaagttgctgctgtcttctgatccgttggcgcgagcaggtgtccgctttaacgatgctttaattaggacaattaattttatgaggtcatcactaaattctgttgtcctgtgtcgttggtgcgctgtacacgtaccaagagggggaacgctactggagtccagcctgatatgaactcgatgactctcctactaaaaacaggtgtcatcgctagagcaatcgtgagcaagaggtggcagatgttgtggctacgataaagcggcctgcacgagtaaccgtggtacaggacactgaagactgccaaaataatagtgtatcctggttgggatgtcagctcccaacgcgtccctgcgcatggcacccatcccaaactgcaatagcataccctcgtggcgaactccatgctaaaatccatcctctagtggtcacgaggacactgtagtcaacttgacccgtcttatttctaatgtcgtgtttaagaataattcattatcaggacttagagaatttatagttgacgcgctttggccagagatggttaggaccccacatcaatgagggacccaaactaaatacactatatttctgatttggttctgcatggattataggcgaccctaacgggatcaaaattgcaggtgactcgattaaaaccttaccgatacatttgacgtgcccagcatccccgtaaacgccggtagcccagagtcaaggtcgcaatcatggacgactacctaggcggcatggcgaaggactggcacgacgagatgaggcctagactgatcgagatgccgttccaagactctggcgaagcactcatcaggcgtttccgcaaacgcaccgacaagcaggtcatgacggagatctgcaacgcacgaaagaagccggaggacacgcacgagcagtttgcaaatcgcctcaagcgcatagctagcctaggccgccacagacgcagacataccatcggtgcctctccaagtggttcgaaggaccgagcgacaccgtgcgcggccaaggagcccctcaaagcgatagtcacgccgtgtgactcgtaagggcgagccctctgctcggcgacgaagtccctgacgccttgagactgacattgcctcggcggacctgaaaccagcacctcaatccctcgtagactcggcagcctcctgccacatgaaagccaaatgggcaagactggaaaacgtgcagtaggcgcctcccttggacgttattatcgatgatgacagcaaggttctcgcgaacctaaccggatccatcgacatacccgtgattgctacacaagatgacggtaccgcaagactgggtacacttcgcctaaacgatgtcggttttgtgcattagctaccaggaactctaatctcgaccagcaagctagatgcggaaggcatatcggtgacaattcgtcgcggtacatgcatcgtacgcaaccgaagtactggcttcgtcgtgctcactgccgcagaggagaatgatgtcttcccggtacttccaaacgctgagagctccacgccagcattcatcagccttagcatcggagacaccctgcagaactggtacaacaggctcggccactttagcacgcgggcgattaagcacacggcatgagccggcacagttgaggggcccatcataaccgactacaaatctttcaagtgtttgtcgtgcctgtatgtcaaaatgacgcgcgcctgatcaagagacagcgcgtgtcgagcgatgtatgagcggtgcaaatctatcacactgatctgtgccgcccattccaccgttctgtacatggcaataaacatatcatgctggtttcgtggcggaactacgcgtgatactatttcttacagctcaaacgcgacgtggctcattgcgttgaatcttcatggaaattctggaccgccaaatatacatcgacaagcgttcattaaaggtacttcggtcctacggcagtggcgaatttattgacgagaaatgccgccaagagtgcctcaagcgtggcgtactgctgcatttggtcaacttagattcgccgtttaaaaagggtatagccgagcgtgccaacagaacagtgaacgacatgatcacaacaatggtgattgacgccaagctgccacacactctgtgggagtatgctgcccgtcatgccgtgtatgtccacagccaagtggcggttactcgtaacatctgaacaacaacaaacggcgttgcgattcgtgccgcgaggtctacccgcagtgtccatcggtttccaagaagaccgcacaggaactcatgcctacacgcaagagccaactgcaaaggtctggcatatccgtgacttcgagttcattgcccctgtcgacagcagtagcgtaggatgccaagttccgcttacgcaagatcgaaaatgagaggatgccggcagcgaagaagacgcagcacccgcgccaactaactcaggccaaaggcgcaacctacatggcggcttgcctgcagacgtcgtggtagaaagcaacggccagccaaatctcaattcataaagtgtggaacgtatttcggcgcggcaagtaggaaccgccctagttgcagctggagaagttgtccgctagccgttgaacacgagtgaggcaaaacacagcaagtgatggccgcacgggcagaaggtgatcgttagagagctgaaagcgctcgaggaaaccaacactggggcgctgatcgagctccctccaggtgaaacaacactaggctacatcctccagtatcgactgaagcatgacgccaacatggagctgacctacaaggcccgcgtgcgcgccagagacgatcgaaaggactttgtgttcggtgaagtggaagtatacgcccccgtcgcgaagctggcttcatgttcgcgatcgtcgtaaacttcggcctctggatgtgccccaagccggccttcccagtacatacgtcaaggacccactgaaggaaacggtgtatcttttacaggtcaaggggtttgaggcgcctggccgtgagcactgcgtgtggaggctaaacaaagcgttgtacggattgcgtcgatccggagccgcgtgacacaaggagatggactcgttcgtctgcatcatggactggaaccgactcgatccaacccgtgtgtacacacgagcaccaaggcaacgcgtaagatcattcttgccctctatatcgacgatatccttattgcctacaagaatctgaccgagatgacacggcctcgaggctagatacagcgtcaagaatctcggagaaccaaagcggagtctgggtatgtcggcgacgtagcgaagcgtgcgcctcaactaacacgtgcaggtccgcaagatactgcacagatttcgcatggaacacacacacacacactgacacgggccttaaccgatcaccaaactcgatgtacaaactcgcagcaagagcacgaagcagacctcccgcacgctttccacatagtcatgacagtattggtggtggcagatacttttttttactgaagtactttgccttgtaaactatgcgctaacttggcgttcttattgcgcttgatgaaataagtcgtggaatccaggaagcgatggctggtcttgctgcgatgggaagaatggtcgcgttggccccgttggggtaattattgcttgcgcactggcggcatctatctccgacatctcccatgtagacaactctcgccggttcccttgcggacctgcacctttagaaagcctggtagctctcgtgctcttcctttttaccgtctccttcgccttcggtttttcgatttgaggctcacgaagagcctttcgtttagctcctgcagctttccgtgcggctaccttggcttttgcttcattagccttggtacgtgctcgctcagtacgaaggtcttgtattgtgtgcggggattttgtacgtggcttgtcaggaactggtgcaaggcttctgtcgacccaccagtgcgcatggaaatcactaggttgtagattctttccagtctcgagaagtgacttcaagtggtggatgcagggtagtcctgttgttctagtgtatgttcctgaacaaggccgttccgatgctatgttctggatgagctctgcacacttttcagcgcgtgattgtggatcttcaacacgacatcttcgtagacaccctttctgaaggcggtcagtatgctatctgtctcggagctgacggcgtgctcgtgtttttcgatgctttcagtccaccaacgtaccattggcttatatatagtgagtagatcggatgtggcgttgcgaagccatagtttcattgcagcgtggtagccttcgactcgagatgtcgactgcagccccaaatgcgaaatcgagtttggtcatcatattacaatgcaatatatccggatatagagccatgttgcatcaatgtacttcgcctcaatagcgcgcagagtggcgagcaagacgagctacgaggcgctaaaagcggcagcagctgcgagtttgcgcatcgagtttggtggtcggtttcgagccgtggaagtctgtgtgtgaggagtgcacgcattggcagcgcgtgtggtggcgtatgtgtgcgtggttgtgtttttccgcgtgtttgcgtattgtgtgcgtagcgctggattttgttgtctttggttttgttgttggttaacccgtcagtttgcccgagtggtctaaggggttacgttcaggtcgtaatgttttcgaacgcgtgggttcaaatcccacagctgacatatccttttgctgcaaaccgcaagccaacgctgcaacgcctcctgcgcgcgctggcgcctctctttgcccgtgcatcggcctgtcggctcgcccagcaccaccgggcgctaccataccactcaaacgacccgtgtcaagtctcgacagctcgatccgccggtaacgcttggcctacacgccgacctcgagtgtccgtcgtcgtttgccctgccgcccacgatagctagtcgagtcagcaacccgctgcgcgcacctgtccgtaccgttggcacgcgtgcgcgaggcaactggttgccaaacccgggccatactgggactcgatgctggcccgggtggtgtcggccaccccggcggtggcttggtgacgatgatggcccgggtttgcaacgtcgctgtggggcataccatcgtagtcggcagacgtccagagcgcgcggagtggcgagcaagacgagctacgaagcgcaaaaagcggcagcagctgcgagtttgcgcatcgagtttggtggtcggtttcgagccgtggaagtctgtgtgtgaggagtgcacgcattggcagcgcgtgtggtggcgtatgtgtgcgtggttgtgtttttccgcgtgtttgcgtattgtgtgcgtagcgctggattttgttgtctttggttttgttgttggttaacccgtcagtttgcccgagtggtctaaggggttacgttcaggtcgtaatgttttcgaacgcgtgggttcaaatcccacagctgacatatccttttgctgcaaaccgcaagccaacgctgcaacgcctcctgcgcgcgctggcgcctctctttgcccgtgcatcggcctgtcggctcgcccagcaccaccgggcgctaccataccactcaaacgacccgtgtcaagtctcgacagctcgatccgccggtaacgcttggcctacacgccgacctcgagtgtccgtcgtcgtttgccctgccgcccacgatagctagtcgagtcagcaacccgctgcgcgcacctgtccgtaccgttggcacgcgtgcgcgaggcaactggttgccaaacccgggccatactgggactcgatgctggcccgggtggtgtcggccaccccggcggtggcttggtgacgatgatggcccgggtttgcaacgtcgctgtggggcataccatcgtagtcggcagacgtccagagcgcgcggagtggcgagcaagacgagctacgaagcgcaaaaagcggcagcagctgcgagtttgcgcatcgagtttggtggtcggtttcgagccgtggaagtctgtgtgtgaggagtgcacgcattggcagcgcgtgtggtggcgtatgtgtgcgtggttgtgtttttccgcgtgtttgcgtattgtgtgcgtagcgctggattttgttgtctttggttttgttgttggttaacccgtcagtttgcccgagtggtctaaggggttacgttcaggtcgtaatgttttcgaacgcgtgggttcaaatcccacagctgacatatccttttgctgcaaaccgcaagccaacgctgcacttccagccctggtcgtcgtttgccctggcgcccacgatagctagtcgagtcagcaacccgctgcgcgcacctgtccgtaccgttggcacgcgtgcgcgaggcaattggttgccaaacccggaccatactgggactcgatgctggcccgggtggtgtcggccaccccggcggtggcttggtgacgatgatggcccgggtttgcaacgtcgctgtggggcataccatcgtagtcggcaggcgtccagagcgcgcggagaggcgagcaagacgagctacgaagcgcaaaaagcggcagcagctgcgagtttgcgcatcgagtttggtggtcggtttcgagccgtggaagtctgtgtgtgaggagtgcacgcattggcagcgcgtgtggtggcgtatgtgtgcgtggttgtgtttttccgcgtgtttgcgtattgtgtgcgtagcgctggattttgttgtctttggttttgttgttggttaacccgtcagtttgcccgagtggtctaaggggttacgttcaggtcgtaatgttttcgaacgcgtgggttcaaatcccacagctgacatatccttttgctgcaaaccgcaagccaacgctgcaacgcctcctgcgcgcgctggcgcctctctttgcccgtgcatcggcctgtcggctcgcccagcaccaccgggcgctaccataccactcaaacgacccgtgtcaagtctcgacagctcgatccgccggtaacgcttggcctacacgccgacctcgagtgtccgtcgtcgtttgccctgccgcccacgatagctagtcgagtcagcaacccgctgcgcgcacctgtccgtaccgttggcacgcgtgcgcgaggcaactggttgccaaacccggaccatactgggactcgatgctggcccgggtggtgtcggccaccccggcggtggcttggtgacgatgatggcccgggtttgcaacgtcgctgtggggcataccatcgtagtcggcaggcgtccagagcgcgcggagaggcgagcaagacgagctacgaagcgcaaaaagcggcagcagctgcgagtttgcgcatcgagtttggtggtcggtttcgagccgtggaagtctgtgtgtgaggagtgcacgcattggcagcgcgtgtggtggcgtatgtgtgcgtggttgtggttttccgcgtgtttgcgtattgtgtgcgtagcgctggattttgttgtctttggttttgttgttggttaacccgtcagtttgcccgagtggtctaaggggttacgttcaggtcgtaatgttttcgaacgcgtgggttcaaatcccacagctgacatatccttttgctgcaaaccgcaagccaacgctgcaacgcctcctgcgcgcgctggcgcctctctttgcccgtgcatcggcctgtcggctcgcccagcaccaccgggcgctaccataccactcaaacgacccgtgtcaagtctcgacagctcgatccgccggtaacgcttggcctacacgccgacctcgagtgtccgtcgtcgtttgccctgccgcccacgatagctagtcgagtcagcaacccgctgcgcgcacctgtccgtaccgttggcacgcgtgcgcgaggcaactggttgccaaacccggaccatactgggactcgatgctggcccgggtggtgtcggccaccccggcggtggcttggtgacgatgatggcccgggtttgcaacgtcgctgtggggcataccatcgtagtcggcaggcgtccagagcacgcggagtggcaagcaagacgagctacgaagcgctaaaagcggcagcagctgcgagtttgcgcatcgagtttggtggtcggtttcgagccgtggaagtctgtgtgtgaggagtgcacgcattggcagcgcgtgtggtggcgtatgtgtgcgtggttgtggttttccgcgtgtttgcgtattgtgtgcgtagcgctggattttgttgtctttggttttgttgttggttaacccgtcagtttgcccgagtggtctaaggggttacgttcaggtcgtaatgttttcgaacgcgtgggttcaaatcccacagctgacatatccttttgctgcaaaccgcaagccaacgctgcaacgcctcctgcgcgcgctggcgcctctctttgcccgtgcatcggcctgtcggctcgcccagcaccaccgggcgctaccataccactcaaacgacccgtgtcaagtctcgacagctccatccgccggtaacgcttggcctacacgccgacctcgagtgtccgtcgtcgtttgccctgccgcccacgatagctagtcgagtcagcaacccgctgcgcgcacctgtccgtaccgttggcacgcgtgcgcgaggcaactggttgccaaacccggaccatactgggactcgatgctggcccgggtggtgtcggccaccccggcggtggcttggtgacgatgatggcccgggtttgcaacgtcgctgtggggcataccatcgtagtcggcaggcgtccagggcgcgcggagaggcgagcaagacgagctacgaagcgctaaaagcggcagcagctgcgagtttgcgcatcgagtttggtggtcggtttcgagccgtggaagtctgtgtgtgaggagtgcacgcattggcagcgcgtgtggtggcgtatgtgtgcgtggttgtggttttccgcgtgtttgcgtattgtgtgcgtagcgctggattttgttgtctttggttttgttgttggttaacccgtcagtttgcccgagtggtctaaggggttacgttcaggtcgtaatgttttcgaacgcgtgggttcaaatcccacagctgacatatccttttgctgcaaaccgcaagccaacgctgcaacgcctcctgcgcgcgctggcgcctctctttgcccgtgcatcggcctgtcggctcgcccagcaccaccgggcgctaccataccactcaaacgacccgtgtcaagtctcgacagctccatccgccggtaacgcttggcctacacgccgacctcgagtgtccgtcgtcgtttgccctgccgcccacgatagctagtcgagtcagcaacccgctgcgcgcacctgtccgtaccgttggcacgcgtgcgcgaggcatttggttgccaaacccggaccatactgggactcgatgctggcccgggtggtgtcggccaccccggcggtggcttggtgacgatgatggcccgggtttgcaacgtcgctgtggggcataccatcgtagtcggcaggcgtccagagcgcgcggagaggcgagcaagacgagctacgaagcgctaaaagcggcagcagctgcgagtttgcgcatcgagtttggtggtcggtttcgagccgtggaagtctgtgtgtgaggagtgcacgcattggcagcgcgtgtggtggcgtatgtgtgcgtggttgtggttttccgcgtgtttgcgtattgtgtgcgtagcgctggattttgttgtctttggttttgttgttggttaacccgtcagtttgcccgagtggtctaaggggttacgttcaggtcgtaatgttttcgaacgcgtgggttcaaatcccacagctgacatatccttttgctgcaaaccgcaagccaacgctgcaacgcctcctgcgcgcgctggcgcctctctttgcccgtgcatcggcctgtcggctcgcccagcaccaccgggcgctaccataccactcaaacgacccgtgtcaagtctcgacagctccatccgccggtaacgcttggcctacacgccgacctcgagtgtccgtcgtcgtttgccctgccgcccacgatagctagtcgagtcagcaacccgctgcgcgcacctgtccgtaccgttggcacgcgtgcgcgaggcaactggttgccaaacccgggccatactgggactcgatgctggcccgggtggtgtcggccaccccggcggtggcttggtgacgatgatggcccgggtttgcaacgtcgctgtggggcataccatcgtagtcggcaggcgtccagagcgcgcggagaggcgagcaagacgagctacgaagcgctaaaagcggcagcagctgcgagtttgcgcatcgagtttggtggtcggtttcgagccgtggaagtctgtgtgtgaggagtgcacgcattggcagcgcgtgtggtggcgtatgtgtgcgtggttgtggttttccgcgtgtttgcgtattgtgtgcgtagcgctggattttgttgtctttggttttgttgttggttaacccgtcagtttgcccgagtggtctaaggggttacgttcaggtcgtaatgttttcgaacgcgtgggttcaaatcccacagctgacatatccttttgctgcaaaccgcaagccaacgctgcaacgcctcctgcgcgcgctggcgcctctctttgcccgtgcatcggcctgtcggctcgcccagcaccaccgggcgctaccataccactcaaacgacccgtgtcaagtctcgacagctccatccgccggtaacgcttggcctacacgccgacctcgagtgtccgtcgtcgtttgccctgccgcccacgatagctagtcgagtcagcaacccgctgcgcgcacctgtccgtaccgttggcacgcgtgcgcgaggcaactggttgccaaacccggaccatactgggactcgatgctggcccgggtggtgtcggccaccccggcggtggcttggtgacgatgatggcccgggtttgcaacgtcgctgtggggcataccatcgtagtcggcaggcgtccagggcgcgcggagaggcgagcaagacgagctacgaagcgctaaaagcggcagcagctgcgagtttgcgcatcgagtttggtggtcggtttcgagccgtggaagtctgtgtgtgaggagtgcacgcattggcagcgcgtgtggtggcgtatgtgtgcgtggttgtggttttccgcgtgtttgcgtattgtgtgcgtagcgctggattttgttgtctttggttttgttgttggttaacccgtcagtttgcccgagtggtctaaggggttacgttcaggtcgtaatgttttcgaacgcgtgggttcaaatcccacagctgacatatccttttgctgcaaaccgcaagccaacgctgcaacgccacctgcgcgcgctggcgcctctctttgcccgtgcatcggcctgtcggctcgcccagcaccaccgggcgctaccataccactcaaacgacccgtgtcaagtctcgacagctcgatccgccggtaacgcttggcctacacgccgaccgcttggctctgtctttgactgtttacctttgttaacccctctagccccgcgattttgggcaaaagttaccttgtattctacaggataaggaaatgccttgattttactattgtggagtttttgcaaggatggtgaaactcacaatcaattcttgttttctacagtgtgctgtacagggtatcattggtagctgtcttgtgataccctgtattctccgtatccaaattataggtttgtagagaaaaatgccaaaattcaacaaataccatcactcacaaactatctgcattcattcttgattattgcctgcatcactgggaacactgttcgaacttcgtgcactacacgacctgacacttgagcttgagctgccgtcgctatcactggagtcgtcggcagctccgctggcttgttgtacgtcacgtacttttgcagtgcgcagtctgatcgccttgagtcctggaggaatgttgtcaccaccacgccaaaggtcatgccaaatttggctgcaggtcgcagagtttgtcggcgcgcttggatcgtgctggcgaaccttttggcagaggtaaacctttcctttggcgcgtgcagcgtcgtccgcagccccttttgaccttgcctcagtacactcaacgcagtagaaggtcgtctcccacggattcatccccggccgaaggagtgaacacaccttgcaaccatactggcgacgcttcctcgtctcttcgccgttcttcccccgcgtgacgcggtaggtgtccacttgttttgtcgtgtgacgtcctggtagcgtgtagcgcggtgttggcgacggcggtactggcgtgtccaccagcgctcggacagacaagtcaccttcgaagtccgcggcccccactcccagcagcgccgtctgcatcaatcgcatgaactcggcatgagtaggtggagctttgccgggtgcacgctcagcttggacacgtcgataaatgatgtaagcgttgaccaacgccatatcaaccagcccgagaaaaatcgtgagataatacttcctcattttcatggttcgctgtagaatacaaaataacaatcgtttgtcagcaacacaatctggggaattacaggataagaaagataaagcaaaaccgacctgaattgaatatcgctgaagacgtagttgatcgtgcaagtccgcgccgcccatcccgtcttggtagtccttcacaagctgtggcgcaggaacgtcgacaacttcagcacctgcacgccttgacaatctcgtcggtcgtgtgccgcagcccgtggcaatgaagtgcaccggtcgattgtccatccaggacacggctaacatgccgggcactgttttcgaatgcgcaattcgataagacccactttgaccgcttcgcttgtttgtaagggatcgtcttgcagtatcctcatcgattggtctggatcgtgccgacatggtacaggccccgttgcaggcggatggaggacagcagcacactggagtagaaccgatccgtgataatgagtcgacgctttggcagcccttcgagtacctcttcaacgttgcgtatgacagcgttgggcccttggttcaaatcggcactatcgctgttgagtcgcccctggtagatctcggccctgtacaggataacgaacacacagagtaagttgttatcctgtagaatacaagaatcttagaacaccatacctgtcacagtagccactgtcggcatcgcacgtcaggaggcacttggttccccaaggatggggctttcctcgtagatactgtcgcatggggttgtacttgcttctcataggaatcattccttcgtcgaatgcgatccgctggccgaccgtcatcccaagcttgaaggtagtgttgatcgtgtcagcgatgggcttgatcttccaggttttgtacttgcgtgcgtcggacccgtggttgtcgctaaagtgtaggaaccttacaatttcctcgaagcgccgccttgacatgtagcgtccaaacgtgcctttgggcaccgcaccttgtgcatccacggaccagtacttcgccatcttttctcggaaagagcacaacgtgcgagcgcacaaaagcccgataaaagtcgtcagctcatgcgcttgtatgggcttgaacgcttgcagctccttctgcacttgatgcaacgtcttcatcttgtacccaggacgccttgccttgatgcgtctttggcgatccatgatctcggtcgcagcctgggtttggcgctgtagctgatatcagttcgactcggttgcaatcgacagccacatcgacttgggcaagaacaagaagaagagcccttcaacactgtttcccagtgcatgtgccaactccgtcggagcagcagaagcgtgtgcgagctcggcagcgggtagttacagagaagtaccttcaacatcaaggcaacaagtttcgttagtgtctcgtacaggataacgcgagcatcattagaacgatatcctgtataatacagatgtgacgaagcgcccgtgccttttgaaaggtcaggttgctagaccgctcgaccttggtcttcgctcagccctgcttagcgctgcaagagttccgctcagctccttccactgagcgaacactcccactccacttcgctaggcttagcccgcttgaacgcttggctcagctccgactcgggtcgggcgaggcgtgtgttcctcactctgcggtccccttggcggttcttttaatcacggctacgccgtgggcccagactcgcgtcggccacaccagctgctgtcgatgttgaaggtctccggaggtgttcccaaacgaaacttgctccccacttggcaagtcccagtccgcacgtgttcacagcccgaaatgccccgggttttccttaatgaacacaacaccacacacaatatagcctccacttcctctctttggttccggctcagaaccacaataccccttctttcccggtcggcctgggtctgggccgagttcgcctttatttctctgagcctgggcgaggctcgtaccagcttctcctttcttctcttcgagtcaagcaacgacccggtctggagttagtgactcggttagagcctagtccgaatccaaggcactcacacacaccctgggactacccgcgcaccaggtccacaatgaaccgatactaataatcacacaatgcaccggggcacgccaatgtccccaagcacacaatacaattaccctgcctaaacctcagaatggaccaccttccacccgaaaatatgaaatacaccctaagatgtaacagtaatatgaaataaccgtactgccgtcgcaccgaagcactctgacaacgttgatatgttagcttgaatttgtgtggatgatcgccaagacaccttctggccaaagacctccaccacttgcgtccttcggggcaaaacgagctctgtttaaatgtttacacatgcacaaactaggactcactaagaggggacgcaatatccccctgggtacacactgactggttgcgcgaagagcgtcggctgtatgcttaccaaagcgcgcttgagatccgcttatatcttcgccttgaccaatgccgaggctccatgtcggcacgtgtcgtcttgaagctgctggaagtcgttgaagctgctggaagtgtccgcgatcttgagcagtcgcgcccattgtaggcaggcttcaagctgatttcaccggatgagtgtactcgccggtaccacccacttcgccgtcagtaccactgtctggacttacgtccagcgactcttcacccggcacttcaactggactccgacaactccgctcaggtccacgacgctccgctcagcttctcgacttgggcggggacttcgttcatcacatttgaggctgggctcagactcttcgtcactccgctcagaccttcgatcctcgcccagcttgtcgacttgggtgaaggctccatgatcacagtaaaagctgggctcgggctcggcgcgacctcgctctgactcctgctcctcgactcagctcggcatcttggacaacggccccgtaaccactggggaggttgagctcaaacttcacccggctccgctcagacatcagcgcctctgctcagctcgacgatctgggcgaagacgacatggtcacggtggatgccgaactcatgctggcggcggctgcagaagccatcggtcagacatcagggatcagctcagaccggagacgcttagtgccaaacatcccagaccccaaacgcttgacgacccagcacagagtctgagcggagactgcatgacaccaacatcagctcaggtccatgttctcggatgctcgaaggctgtaagcaccgatgcgccaccaagctccaacgataatcctgctaccgggcttgggcgagatgaactcaggcagacgacggacgaggtcgggagaaaaaatctctcgggcctcgtcacacagatcggaacttactttcgtcttcgaagtatgtcgtccaaccagtcttcgcgtgctcactcaactggtccttggtcatcttgtcaaacggcgttccggcagatagatcgacagcgtcttcttcatcgcttgtcgcttcattttcgctcaccgagctctcgcttgtgccttctacatcggattcgccttcgtcatcgtcgaccctatagtcatcatcatcaccagagtccatttgatcattgccggtagagatgtcggcactttcagccggatgacgagcgcttcgaggcggctgaacacgtgtaggggtcgctggcgaagggacgacccgcgttggagatgttgctttccgcgcgagcttctttggggtcgcttttgctggtgacttggcgggcgccttggcgggcgactttgctggggtcgtctctgctgacgactgggctggtgctttggcgggagacttcgctagtgacgcggacgactgggacggcgacttggcgggcaccgtggtgggcgtcttcgtcggcgacttggatgtggactttggggccggtctcgagatcgggttcagaggtggaggtgcggattggcgtgtcggcgaagcctcgaccggcgagtcggacgccacggcggttgctgctgccgcccccgcgggtgtctgtgcttcgcgttcaatggcttccgtagcttggcgtttggtaggaggggcctcgtcgtacagaactgtcgcagaatccccacggcccacagcagattcatggtgttagaaaaccaacaaagctattattgtaacttgccgcgtaccgtggactggtagatgcttccagacttcatctgctccgtcgaaaatagtcgacaaggtgtgttgcattcggtcgtttctcccatcctgcacgtgtgtagaagcgactttcgttggagaggcccttcggccgctcaagccgccacccaagcttttttagttttgtccacagcttggaccatgtgagaggcttgatgtgcttgcgtttacccatcacgtgtctgccttcacttgccttccgtccgtccgattcgcgaatggcgcgaatgctgggcgcgcgcaaattccctaaatctcgaaaaacctgggccacgaattataccccccgagcttagcaacaaccttgcttatcttgtgatcggttcaaatcacttgacatttgtatagtttcatttgattaaagtatgcgtgatttcttatcctgtattatacaggataagaaaagtgcttaccctgtagattacaggaagaggggctagaggggttaatgtatggttgaatagcgtcgatttagcgtgcgcaagaggaccctaaagtgtgtttggggtagtaaatactcgctaaacacatatagcttgaaataaattgtgctgtgcagtagtttgacactttgtacggtaacttgtacgacttatcgagcacgagtcgtgctgcacgacgtatttataaaatggtactagagtacgaatttttgttagtcgtgtatggtcaatgatcgactagttgtgcagatacgccatctcctgcatgatttagcacatccaatactgattcacatccttttggcactttcagtaagcgccatttctgaaccaaatcgctttcgaaacacgattcgtgcaactcgcatccacagcccctatgatcaatcgccaagtacgaacactaattagtgcactaaataagagtgcaaactggatgcaaatcacaataaatgtaatttctgttttgcgattctatcaggtatgaataatacgcataggcgaattttaggtgcagctcactatatccaaatcacagtattgtatcttacaatttttttggctacagtaacatcgggcctcaggtccgattttttactttctaaaattaggggaggtagtgactggttactctttgtggcctccacttttcataagctctgcccgctcaactttgcgctcatttacgttcgaagtcgcaaatcgcgttgatttgccactaatctcggactttgcaagcgaaacactgtcgcttctctagtaaaaagcaaggatatatcgaaatctcgttgatttttcaacccaggccccttatttcaccctgtaaccccaacaattaaagttctcgagctcttttttcgccaaaaaggatgaaaaaagcataataacgctagttcctatgtaaaatcgttttaacaaaaaacatcttttcggatcaggcgacaaatctcggctgatggtatttacaccggacgagactttggttacgatctccctaaatcagccctaatgaggatggagaccatggccctacaaattccaaaatggaaaaagctggagggctaccggctgcctctgaattacataaaagaatgacggggagaattgcacctcacataatagaagataatgatgcgctgcgctgcatgaaaccataatacttagaatttgcacgcattgtcctattcgattcttcccctctggctcggtttctctgggttggattcacccctcttcaaatccttagccttatcccaggccaaggaaacaagcacagaatttggtaccgcacgcacaggatttggcaccaggccgtcgatgctttgggacaccgcccggtgtgtttatcctcacccgacaaatctatgggtctctgtaggtcggtcaaagttcagaatctcaaaatgaggtaattactaaatggattttggtgattgaaaacaatacaagattctaagcataatgcgggtgccctcttgcctgggatcgatttcttttccaaacaatttcgcccaactgtgaatcaccatatctttgtttttatctgacggttgactaggttacaccagggtgcgatctataagagaagcatgtgtgtgtgtgtgtgtggattcttggattctttggcaggaataaaatgcacgtgagttcacgtgacctagggttgcactgctactagtatgcaacacggaggctacccctgacataacccattatgcagtataatatagtttacggtatggttatgctagagggttgcgttggttacgttttgattttttcgcttacgacttggcaatatttcggattgccttcaatcggacaggtttggatgcctttgtttagagtaccgtcatgccacttacagctagttttcgcctacaacatttatttagttgtaaagacgaaggcactgctcagctcctggtattagtctcctttgagtagctagtatacttcccatgataactagcgatctatcgttatttgtaggaggatgaataacttcactcattgatattgtcggcagcactcgcccatacactgacaaagtccatctcggagacgcggacaggtttgtagagctagcggctagaagaaactgtcctcaacctccgtacgttgagcggcgttaaccgaatagcatcagctaggggaggagacattgttcggcgctgacaacctcggacaggtctgagagcccctctccttgccactgtaactcgatatgtaagcgtgcaataaacgacagcccatcctgtggacacgcagaccctccggggtctgctccacagccgaggcaccacacgcactggaaccacagccttcatggtcgctaacctatgcaggtaatctcattatcgccctgctagtctgtcttagtgctgctttacactgatgccccgccgtcctgtcaacgcaaaacgaagcactttgcaacccgtctgatattgggtgagaccgtcactctgctgccgcaacacctcacgcgtagttcgtgttggtctccgacccggcagattcgcaactgagagcaccctgagcccccgcttggactagctttcgctatcaccgacctaatctaactatttcacagccaggaggatcttccagcgaggtcctctccgtcggcgattgtccgtcatcgctcctccaccactggtttccttgtcttgatgtcgttgtcctcgcccgcatactatcttcctcatcgccaattgacgtgccgcccctcctgctggccgtagaccgccatacacacatctaccccatcactacgtgtgctggtggcgctagacgcctgattccttccacgcgggacatatcggccaccatacggtacccgactgccttgcatccagcactacactccgtcatttcttcctcctcgtcactcgcagtcagatcgaacgttgcgacgtgtaaacacttgaagtttgtatgatgatgttcacacgggttggtgtacaagctgttcagtctgcacgcaagtggaggctgagggaaacgagactctgaacgccggaatagcttcggcagaatgcagggacttggaagggggggaggaggcctacgctgcaggcggtaaatgttggaatgaatgcagtcctccttcactccttccttaacccagtgtatgagctgttagttcttgtgctcgataagccacacgctagcggcccctggagaacgatctcgggcttcacccgtaccgcagccagcatccagcattcagcacacaacagtgtcgtagtgggcattcgttgacatgtaagcgctggaggcgcagcgcaacatgcaacgtcagcatggcgttgatcataatgtagatggcagcagtcgtgacgttgctcagaatgcaggcagcagtagtgagagtagtgtgggttctttcggcaccgggctgcaacgcaccagccgttgagcatcctcgcaaactgcggttatctcacaatcgtcacttggtcgagattggctggcagtatggtgcccttcgtcactaagaacatgttttgcccacaatatagagggtgatattcgataggcaactgaggggctggttgcgttcttcgtgtctggtgttggtgttgggaaggtgtgacataaacaggcaacacgttttaatatgatcggctgagattattttcatcggtgttgacggcgacacgactcccggagtcgtgtcgcggccaacaccaacagaaaggacgggcatttcacacaaagtattggatttctgaaaagcccgaaatggcgcggccactaggaacgagagcgagtgagcgcatcgggcgcggtaaacacgtggaacggtagcggagtggctagtacaggggcttctgcacacgtgcttgcggttgcttatgccattttgtcccgcttgggggagcccagaagtgctgccatcacttccgaaaataccacccgaaatactcgcatagccagaatgtgctgctttcccaaaacacggacacgaaagagctaaccaattggataggtgtaggagagagtcaaaggtacacatcagacaccaaacaccaaacaccaagaacgcaaccagcccctaagcttaatagtgtaaaggctttgcgtccagcctcgatttaggtgcaacctacgaattctcgcccgatcgtgatagataaactctgttattgccttttagtaaaaagtcaataacagagtttatctctcaatcatttaaaaatgattatcaaccaatcaaactgaagcgtttattcagccaatcgtagcgcatatgcaaaaacctatagtacggctcgtaacgccctgggcctccgtccttggacaccgtcgagatggacccgcgccgctcctacatgtgcgtgcttctgcctctcgccctgcccgtctaaccgtccacccgagcagctctaacccgtcgctccccctcctcctcgtgtctcatctaacgccagggagctcgtggcgctggacaagcagctgcgggacctgctgcgcgccaaccctctcaacgcccaagacgccaatgcgctgcgccgccggctcgtggacgcggccacgcgcctggcggacgcgcacccggccttcgcagcgtccaaggaggtggagcaggcgctgtggaagccctgcttctaccgccgcatcgaggacttccgccgccgcatccgcaagtacgcggcggcggcgcaggcggatcgcaacgtacgcgagcactttgcgcgcgtgtccagcgagttccagcagttcctgaccgaggccgcgggcttctacgcgcatctgagggacgtcttcgcgctgtggctgcagcgcaaccgactggagagcggtgcggcagctgcgaagacgaaagacggcagcgacgccgcgcgctgccgccagagcttgtaccgctgctacgtgtttctaggagacctggcgcgctaccgggagctgcatagccagaaggccaagaagaactttgcggcggccgaggcgctgtaccaccgcgcgctggcggttctgcccgagaacggcaacccgcacaaccagttggcggtgctggccacgtatgtggaggccgagaccgtggccgtgtaccgctactgccgcagtttgctgacatcgcagccgttcacgaccgcggaggagaatctggcgctgctgtttgagcgcagtcgccaacgcccgctggctgcgccgatcacgttcacgtcgccgtccccatcgtcgaaggaaaagtcggcgttcttgaagagctatttgcaccggctcacgcggatgaatggtatcttgttcgcgctctcgtcgccacgtgggtctcccacggcttcttcgggaaggagcagcaacagtgaagcagtgacgccagtgtacccgcgggacatggaggcggtgctttttaaggacatgcggacgctgctgaatgcaggtgtggtgggcgatgcattgttgctgaaggtggtggtgacaaacatcttctgcatcattcgggcctccgactcccgttcgcaatccgccccccttgaggatgcacttcgtctctcgattcgtacgactaccagcgtgatggagtttcttttggacagcttggacgccaagccaaaggcaggtgccaatggcaaaccgacaaaagacgtgacattgtcggcgctccgccttgcaggccccgtggttgtcttttgtgattacttggaactgcacccggatatgatcgagcagctggagcagcttttggtgcatcgccagaagaaactctacagtgacgtggccacgaacaaccaaggagccggcgcggatcaatttgcctcggctttcctcgaaacgctggctaagcttgtcaaccacgcgcgcgttcgcgagttgtacgcgcctctggtagcatccgctggtcaacagcacaatgatgaggtgccgtctgccgtccgtgatcagcaacacttgctcaaagaaagtttcgagcttcgaggctttgcacccctcgagcagaacagcgctacgcctaagtggccagatgagtgggcgttgcagacgtcgtcgactggagctaacagcgcatcgccagtgactccgttggcagatgccgagtcagcaaaaatccgtgcgtggaagttgtatcactttgctcgctacttgtgcgatgggtacgagggagacccgttgctcttctgcggcgcgtctgggaagtttacgacttctcctgtggttggtgaagctggccctcagcaggacaatggcacgtcagaagcatttgcctcgttaaatctcggctttctctcggccagcagctcgaagccgcagcaacaaagccaaccacagggtggtggtgttaacgactaccgttctggaaccggcgtggatgacgatgacgattttgacgacgaggtgatcgtgttccagccgtcaccagcgcttactggaatgtcaggtaaccatcccgtgaagcagcatggcgggtttatgacttctccgttggatacactttccaatggcggtgcctttagccttcgagcaccgagtctaatttcgtctgcagaggaccacggacgtatgagcgtcagcagccagagcaacgcgtttggtggtgctcacagcgggtcattcggatcgtctcttggctacccaagcttcaacaccttcaacgacgcgggcagcctatcaggtaatccgttgctgtccggatggggaaacagcactaacaacaacactaacggcggcatgctaggaggcagcttgagcttgggtatgggcatgggatttggcggcaacactggtctcgacgctggatttatgatgcctgctaccactgcagctggaggtgctgcgggagctccaacccttggaggcttcgcaaaccgtgttggcgacagtcaacccttcgctcccatggccgatttggctgccgttgagcgcgagtcggctctgtaccagcagcggacgtcaagcttgagcgccttcctgggcgcatcggcacctgccagccagacgcaggatccatctcctcctcgcagtataccgagccgcccgccgccaggttttgcagccgcatcaatgggcggccagcagcagcagacaccgacctcgttcttcaacccgtagagcccagtgtagctcttttgctacaccgatcaaggtttaccgacggtacgcgaggtggtgtgctgaccgtcgctgggcggcggatgtgaaggcgacagaagtagcggagatttcacgcggcgagcgtgatgttcgatagtcgtggagggcagatcgaccttcccgccctccagttcccgcgtagctggagacaatgacgcgagaactcaaccaacctgaacaagaccacctcaccattcccaaccagcacacgaagatacgcgagacgagcagcgattgaagtgcaccacgagatgaacatcagcctgcagtgaacgaacgcgtcaccagcagagacttgcagctccaaccgcttgctggtcgtatcccgcactttggagaaggaaggcaatggaagtcatctcgtgcactcaatcaagcaagaaaccgataaaaaaaggaaaaccaagaccaacgaacgctgacaaaaaagaaaacacaaccagcaagatagcaaagtcataacagaggacgtaggaattgcagcagcttcacagtgaaccaccggaattccgtctaagtacgaacccgctcacccgctcatttgacattgtctgacgtagcgcacgaagaaaccatgggatccgccgccagcaagacgtcggcgtctgtggcctcggcatcgcgcaaccgcgtgatccgcaccaacgtgtccctggagcagctggtcgctctatcgcgcggctcgtcgtccgagctgcccacccaagcgcaagccatggcggtcgagacgtcgtctacgcccatcgacgcgcacggctccaaggtggaactcatggagatgcagcagcgtctgctgcaggacgtgcagaagatcgacgacttcgaccgcgtcaagttcctggaggagagcacgcgcgccttcgaggccaccgccagcagccaccggccgcgctcgtcgcagcccgttcggctgccgaccgacaagacgaacgccgcgtcgtccacgggcgtgggcggcgcggacgaggagcaagtgcgcggccgcctcaccgggcgggacctgcggacgctgctgcgtctccactacgagaagcccgagagctggacgcccgaggttctggccgacaagtacggactcgacgcggcggacatgcactgcatcctcaacagcgtgggtccgcccaacgttcttccgccgcgaggctcgtccgagcatcctctcggcgtgtggtttgacgcaccgggcatgttgccagcgcagtccaagcagcagaagacgttggcgtagcgtagtctagcctagcctagatgaatatatacggtaaatgatcatattctagacccaccttgcacgttatgttagttagtatccatatcccaggtcaccccaaagaagacgttcgcacggataggaagggttcgaaagaaaaagctatttagccacgcgagggtgtgcatatacataagcgaaagtgaggcagagcagcgactacgaggtcctagcacaaggccatagccaaaacctacattcggcccaccatctccagcacaggatcggagggtacaactgcaacgagtgcgaatgcggccatgacttcaacagctcgacgtgcggtcagattccagcgccttaccgtcggttaagctgtgcgcgaagctgctcgttctcatcctccagacgcaccagcttgggaacgacttccgagtccacttcctcaatctgattcttgaggtggtggttctcttcacgcagtcgcgaaacctcttcacgcaagtacgtgttgatgtccagctgctgctctagcgacgtcttggcctccagcagggcatcctccacctccagctgcttgacgtgagccaaatcggcttgttcctgcatcatgcggttgcagtcggccatgatcttctcgacttcctcctccttctgagcaatctcgctcttctttgcctccagcgacacctcgtagctcgaaatctgctcttgactggtattgacctgttcctgtcgcttgcggagagcctcctcgttcttctccagctgctcgcgtagcgtctgcatctccagctcatactgcacctgtccctgctgcttgctctgcgcagcgcgcagcgtctcctgctcgttgagcagctcagtgatcatctgctcatctgcagcgcgctgactcttgaccgtctgcagtgctgcggcctgggcactgagctcctgctgcagcttcatgagcctcgtgtcgatgatgcggcgactggccagcatgtcctcgtgcagctgcaccttgttgtccgtctcgcgagccgtcttccgttcgtccagcatacctgtgagcttggagatctggccctgcaggatggttttctgctcccgctcgagcttgagcgcgtgctcgaatacggtgcctgagcgtttggcgtcctcctcctccgtgaacgtgcgcacgtacggtgtcagcgccgaccactcgccgcactggcgcgcagcctcatccactacacgcacccggaacacgtacgtctgtcggcgccataaaataaatagttcataaaaacaattatcagataagaaaaaaatgggttgaagaaatcgcgcaccgtgttggacttgaggcccttgaccgggaacatcttgcccgtgaagagcaccgaatcgttccacgagtagtacacatagccatgctcgctgtggctctgcagcggataaaaggcgtcagcgtgagaacagagaggcaaatcactgggggagaaggcgtgagagagaaaccgaccgcctgcagcttgtagtccgcgtcgccgtccgcgtgcggcggcttctgcacgcgcagggtgatggactggtccgtcttggagacgacttcgggcgcggacagcgtcggcagctctggcatgacagtgaagtgcatagcgaaggcgaaggcgaacgcttcttcctactgtagtgatcccaggctttggctcaactttcgcaaactgccagaaccctactgcgattatgccgttagaaaatgccattattatcgcgatttcgaaccaatcacagcagcggaacgttcactttgtggtcgtcaattttcatgttgtgctcgttaatgggcatcttatcatcatcgtcgcgtgcctgctgcgtgcctgctcgtagaccctcttgacctcgccgcagcgcagcgtaacagagctgccgctagtttaccagcagatttaccagcgcatgacgcggctctgcgcggggaagtcccagacgaaggggcggccgggcacgggcggcaggttcttggcgtcggcgtcctcgaggatgtccttctcggcgtcgccctcccactcgaagcgcacgttgtgcgtggacgcatgctgcaggatgagcttgtcgcgcgcctcgtgggtcgtcgacatggccgagcgcgtgcccgtggggtcgtagcgcaacacggccgggttcttgttgccgggcgagccgcgcttggcgtccgccgggatctcggcgcgcttctgcacggggatggacgggtgcatgcccacctccgtcgggtacgggaagcggcggatgtcgcgcgtgtagtactggatgttgtagatgctgtccttggagtcgctggacggcacgtgcacgccctccgcctgcttgtcgggcgacgggtagcggtagccctgcgacaccgccggcgactggtgcacttgcttggtgcccgtggcctccgtgaacacgagcatcttgcggagctgcagcaattaaacacccaagaactagtcagcatcgcgctcttccctgctacttccgagacggcaggcgacgcaccttgttacgcagctctgccggcagcaggttctggtactcgaacttgacgaagggcttccacgcctccttgccgctcatgattcctcgcttcgcttgcctgtagactcttccccctgcttgacagcggcctgcaccctcggaaatggcccgaagtcgccgctagccgcacgatgattttccaccaatcagcgaccttaacgtttacttttatccaatcactctgaaatttatgtgatgcacaccacctaggtaaaatcgaccttcattcctcaacgtcatggcggagcggcagtacgccgaggcgctcgaggctaccgagcgcgcgcagagcttcgagcgcgccggccaggcggcgcaggccgtgccgctgttccagaaggcgctgagaatcctcaagcgcctggcggtggtcgagtcggcgacgcagcgcgctcgtctgcagcccacgatcgcggagctctcgacgcgtgtgcagacgctgcagcagtcaagcgacttcctgctgacgcgcgccatggagctgcacgcggaggccagggaatcagaggagacaggggccgccaaagtggacatcgtgatagagaagtacatcgccgcagcggagacctacatgcaggcgctcaatgctcttccccccaaggagacgacagccaaagctgccgtcaaggagcagctcgagtacgtcatcaactacgtgtccaagctaaaagtgcagactcagacgcagaatcaggttcagcaggttgaagtgcaggacatggacgttgcagcgctgcagtggcccgagccgcccgtgcagccgcaccacaaggcggcggaggtgacgcccgcctacgcctcggctgctgctgctacgccgccacctagtgttggagatgttgcagttgatgtgaagaaggtggaggaggagatgcccggagcagcgtacacgctgcaggaactggacgtgctgcgcaggtcctcgcagatcaacggccacttgtttgtgccgtggctggatgatctggatgcgcaggagaagtttagtctacccgagccgtttgatgacccagacggacttgtgccgctgtcggctaagcagaagaaaaaggaggcgacgtggatgagacccagtgactatgctgcgaagtgtgggcatgcaccagtgatgatcgcagaaggaggagtgaacccgttagtggtgaagcaggacattgtcacggattgctcgtttgtggcgtcgctgtgcatcgccgcagcgtatgagcagagatttcagaagcggctgatcacaaacattattttcccggcagacccgaggaccaaacagccaatgtataaccccttcggtaagtacgttgtgaagctatgggctaatggtgtgccacgtaaggtggttattgacgacctgctgccgatgagttcatccaccggacagctactttcaagctgcacgactcgtaagaacgaactgtgggtgagtctcattgaaaaagcgtacctgaagctcaatggaggctacgactttcccggcggaaattcaggcattgacctgtttgcgctgacagggtggattcctgaacgtgtccctgtcaacgagctacttgatgcaccgtctaaggaagaacgactttgggagcaactgaaaagcgcttttcactatggagactgcatcattacgatgtctacaggggacatccccaagcaagaagccaaggcgatcggtctcgttccgatgcacgtgtatgctgtactaaatgtgtatgagctcgctagttctggtcccgacccagcatccggcggcgatggtaagaagacgcggttgcttcaggtgaaaaatccgtggcgcaagatgagctggaagggtccatactcccgccacgacaaggaaagatgggacagtgctatcggcgacgaactacgagcatatcaacgccagttctacgcagccgaagaaactgaaactgaagactcgagtggacaacaagatgatggtttgttttggatcgactttgaatcagtgaagaagtatttcgagagcttatacatgaactggaaccccgagctattcccctacaaaggtgtgtgtcatgagcactggccggtagagctgggcccagtgaatgattcgctcacactaggtttcaacccgcagtactccctcacattcagcaagtgctcgccaaccaaaggaacgacgacttcagctggatcgtgtactgtgtgggtgctcctttcgcgacacgtgagcactattgagcgggacacagactactctaatcagcagttcctgacgctacacgtgtatcgcggatcaccagggaagcgcgttttctacaatcactgcgccgtgtcaagaggaacgtacagcaataatccgcacacgctcgtgagtctggatctggatctagcggacgactctgagccgtcttttacactcgtggcttcccagtacgagaaattcgcagcgcttgattacactttgtcgatattttccactcggccgtttacctgtgaaccgatcccacaattggagacgacagcaccaacgtcagttgtgattccaggcgcttggagcactgcctgtgctggtggtcgtccattttactcgacattcatggacaacccacagtttcatttacagctgcagaagccatgccggtcactgtttttgtttctcgagactgaagccttcttttccaaggacacaaagaatgctagtttcccgatcaacttgcgtgctgcgttgcatacgcggcaacgggtttgtgatctgcacaccactgtcaatgagaccccagaggacgcggaaccattgaaagtactcagctctggtgaatatcggcccgggttttgcttcatcgaggtgggtggaagcattctagcttcaggtgtgcacgacattgtgttgatcccatccactttcgagccaggcgttgtgggcaagtttacgctgcgtgtggttagtgatcctcctgctggtgccagtatcacgtatcggcaacttcctcctgaaggccatggcttggagcttactcgattgcgcggcaagtgggatatccagactggctcagctgcgggctgctccaactacggttgctatattttcaaccccaagtatttggtgcacgtgacgcaagagtgcgatatactcgcaaggcttttagtccttcagcccgaggcagacgcatcacccggggaggctacggcgaaagaaggtggcgttgctccatccattaacgtgtcggtgtttgcgagtacgtcggaaggcgatttgttactttctacaaatcctaaacaagcatttgccggtgccacatcggcgcacggtgtgtatgttagtggcgctcccagtggtgttttggccacagcttctcgacgatacccccctgggtggtacatcgttctcccatccacctttgaaccacaagaattgcactacgagattcggctgtacgcttccactcatgttgacgtgcattctctctagccaagacaagtatgagagacaagactgcgcatgacaagtgtttcgcggcttagtggaaatacaaacgggaatacgataaacatcatcaaggatgcgctccgagacaggggcaatgaagcgctccgaatgcgactaaacaaattgcggctggttctcaatgttgttttcgtcacctccagttcacttgcaactcgtaattgtatcgtgtgggacgatgattgaaggtggcgcgttggggaggcaatagcctgtagcaacagttgcaactgcaactgcgacggcgctccaccctgtttacgtcttggtatcaagatcaacgtggtaaacctcacttgtgttgagcattcgtaagacagtttgacgacaaatcaaatttagccatgtgattggctaatattatgcgtggtgttgtccgtgtatgcccttggccgggccgtctgcgtcgccgtcgtggcatgcaccagcaacggatagccgtgctgacgagcagaatcggcagcatgaacgtgtatttgtttcgttttcgatttcgtagtaatgtgaagtgcatcacagttatttggcctaactagcgacctactaaatgccaggtccttcaaatgaaagtgtgtattatacatattttatgaggtccgaggagctcttccatgaagccgcgtagtcggcgtaagtagggagatgcccttcggaggacacgacgcggttggtacacggagaactgaattgtgcttgagcgtacattgaatagcaaacgagtagaatgtacgctcgagcactctctagaaacttgtcaacaaagccgaaacggaaacactacgtagattcaagcttagcagacagcaatagactggcgcggttataagcgctctagatttcagaatcgctgcctcttatgctacgtaactaaccccgttattgaaggaaggcttgcccgtatcatgatacgtacaatgcaacctgacagtacgaaaactcctacaatatttccctcctgacactattcctgttgtgtttgggcacggcgcggcgaggaagggtggaggttgaaagcagttgagggggcgaagctggtgtagtgtagtgttgttgaggtgatgcttggggttcgaggcaaattgaaaagtgagattgagacttagaggtaaagactgctatcactgtgagactggctggcagcagaggagctctgctgtcgaatctcgggccccatacactacaagtaatagatctaaagcgcctacagcgcacctctgaatcttgtacttcggcggtgcgagtaatcccgtgccggccgcatcagattcgagtgctcggtcaacgcatccagcttctccgttcggacggaggcattttgttcacaaagagagattcgcttgcctgtggcgagctgcgaaaacgcaaggagtgcggcgcaatccttacaattccttaccatccaggcactgaaaagctctgggcgtggcattttaagagcaacagatcacaacagccttagcgctaaggcttcacgcaaggcctggcgcggccgccgtggctgcagctagaatatcatcctgttgtcgacggacctacgcgccatgcaactgcgtcgtcttggcgaacaaaggtgcaccaacacagcctgcatccgcaccgctgtcgtggttgagtgggcccgagcatgtgcatgcagctctgcacgtcaagttgagcttttgaccaataatatggcgtgacaaaatacaatgtagccactggtatactaaaatcaagatgtaatcaaaatgcgttgattgcaaaacgtaagacgctttgtcttacggtatgctctctagggaccagtatcgtcttacgaaagagcatgaatcgtaattgtatcgtgtgggacgatgattgaaggtggcgcgttggggaggcaatagcctgtagcaacagttgcaactgcaactgcgacggcgctccaccctgtttacgtcttggtatcaagatcaacgtggtaaaccgaccgagtcattggagagtgtacgtggcatattgtgtgtggaaaggatgctgcattattatgcccgcgctgtagattgaccagagtcaaacgtgtgccttgtcgcagtgggcccggtaatcaatcgtatcgtgatcaagccgttctgacggacaatggatccgtgtaagtgcaagacaatcgtgaaggagcgatatttgcgactgcacagtgatgagaagcagcagtgacgagcaccattcaaagggcgacagtctcccacccagcaagctacaagagaaacgaatcagttcactgttaaatttacaaacagcgatgacgagaggtgctaggtcactgccacctttgagccaagaaacccaccccgatggcgacgatgatgacgacggccaagaccccgctaagaatgtcaagcatcaggcttctgctaaaacgtctaactatgagcgacaacaacgctatcgggacaaacagcgacaatacgtcattcgcctcgagtctaccgtgaagcgtcttcggatagacgttgatcagctgctcatagtgcgccacagagcccaagaaacgcagagagaggctcgttctggtgtctgcgcaagtctgataagcactgcaacgatgacggcgtttgtgacaaccatgtgtgaatgcatgcagtcatttgagtctggagcccgagaacagcaagcgaagtttctcgagtcgtctatgcgcgaagacgtgcagtacggcgatctagtcggccgccagatcgtcctggatcagtggacgcaatttgcgcccagcttcgatggtataccccccgttgtcaagcattacacattcacggtggacttctcggagcaaggtacaacggtcgggcacgcgggtgcagttcttcttctttgcctgacagacgcgagcctggccaatatcttcccaaacacctgtaccaatcaacacctgcgggacaagctgctccaaaaaaccgtggtgccatttccggtgactgcttacttccagttcgatgaccaagggaaggtgtgccgctacgaccccacaatcgacttcatcagcggactttacgcagttctggggaactacggcgacgtggcgactacgcttaaatcggcagctgtcaatgctgctgggcaatttcgtggtggagtggcaactaatcgacatggcaccaactcctgctccacgagcaccactgccgcgttggaagctacgtcctgccgctctacttcaactgtcaacaaactctcggtagcgtttatcctgtcaaacggggaagactcgtgatattggcaggcagactgcgtagtgagagccgctttttagttagtcgcgatgacgattgcatattgtgcaaatgaaatcgagatgataaaagccacaactctttatcggaaggacaaagagctacacgatacaggattcagcgtcttcttgtggctttaggctggcccaactgcggttccaacggctactgcagcaagaggttaagcattggctcgacgaagagacagtgatggcactatatcgtcgaggagtcagcacccgatgtgcgacggtactactaaaattttggataactcaacctgcaacttgggccgaaagcgtctagcgagccttcagaagctgtacaagccgtgcttagtcacaaaatgttgccacacacggcatgcatattttacctttacaacattcgtggctgtcgacaaatccttgactgtcccattcgcatcgtgtgaacctacatccaatggtttcaatatatgtcgaagcagccatcgagaactgtacgatcgactgtagcttttctcgacgcagcgggactgatttcacaatgcgctgtacctccgccaatgatcttctttttgtcagaatagactgtctttgctgctaccagacccgaacacagttgacactcagctggcagatcgagccgaacttgggatttccgggtttattattctatagaccggtctgcacgcactggatatcacttcacaccggacaatgcgaaatgggttaaccagcaattgctgcacaacaggatacttacagttttcaccagttttaggtattccagctaatggcagcagtctagttattctatcttctcaacccccaatacctccttgagaatatcgtatgtcgtcaagctgatgccagtagatacagggctctacaacagtgcaccaaacagaaaggtgagacacggacaaatgctcattcaatagcttgaaagagcagtacttactcgcatccagtttaccgacacgcccttgaaaagtccccgccagccctcccgcgctaggataatccgagcagtagcgatcacacctgtgtactgcattttcgcttgagatcctgaaacatagccgtccgtctgaattcgccttctgatggtgtccatggggtatgtgcctggacagcaaatacaagccgttagacctctgttcaagaaagggcacgcacgtctaaacgactagtcttacttgtttgtgcaatgcacgccgcaaaatacgagcacacaaacttggtcaacgggttcagactagccttaggcgcatcttcaccgtacttgtgctccaatcgtcgacgctgaagctcaagggtctacaaaaatgcgcacagcacccgtgagttcaacacaataaaagagaacaatggcctcagtgttgacacgtacccatatcttgaacctttcattcagcgagaacccaatgccagtgtacggcagcgtccccagcagcgaaggcaccagtccgcgcgagaaagagcgtactccttccaccttgtacatggtcaccacagcctcgtagatgctcgtgtagcggtgcttccccatctgcaccatgtacctggccctgacgatatccagcgggtacgccaccgtcaacgacaaacctccagccagcgacccggccgtgaccagctgcaagttgctgagcttgggcacctccacacttccctccctttcagctttctggaagttgtaggcgtggaatttatgcctgaaaaagtcgaaccctgagtgctgcagccccgcgtaggggatgaccctcaggatgttcagcatattgccccgaaagagtgcgtggaagccgtcgtgcacgtaaatgttcctggccatcctggcggcgttgcggaagttgaacttgtgctggtcgttcacctggaacaagatcttgacgcggtccagcggcgccagcgccgacttggcgacaatgcccgccatcccgccggcaatgaacgacttggagaccgtcaccatggaccctttcctctccgccgcgtcggctgcgtccgcgtggtcctgcctggacaccttctgctggacgtccacctcgaatgagtcgtccgggtggacaccataccccgcaacggacgcctcgtagtcctcgtactgagccccctcgtgcaccctgcgcagcttctgcctggcctgcagcagcgcgacgatctcgtcggcctccgagtcctgcggctgcaggtccgggaagaggccgtcgccctcgctgagccccaggtccagcgccgccagctgcgcggcccacgacgtgtacacctgctgcacctgctgcgggtgctgcgccttccagcgcatgacccactcgcagaagccgccaaagtccaggcgctcctcgcgcctcggcagcagctcgcggcgcacgcggcggcgcgtctcggcgctcgggtccaggcgcgcgatctcggccgccagcgccccgcgcgagacggtgccgctggcgtccgggcgcaggtccgcgaagaaggcgcgcatgatctccagcacctcgggcgtgagcgcaaagtccgggttgtaacactgcagcgcctgcagcgcgcgcgtgagctgcagctgccgccgctggcgcgcgcggtcgcagggctccgactccgacgagtccatgcagcgaggatcggactgactgtgcgactgcgactgtgagacgcacgcaggacgcatacgaagcggaggaacgcgagtgacagattagggggtcgggtgagggtgttttgtgtggtggcgcggggtgtgggactggacccggttctggttagtgaggagcggattggagggatagaaaggggaggagagaggacccgcttttggcgagtgtgatggataagctccgcatgacgagcttgaagttgggggacgcaaaacgcaatgttcatctcatcacgtgacgccgaaaccaaggcaaacgaggaatgaggtctgcatggatcgctattaaccgcacggcctgtattaccggtaactaacctcacagacgaacaagcgaacagctacgaatggatttgttcgtgccacctttgataggggttgcaaaggctcgtaatacgaacaattgcttaaacactttctaccagcttagtgcgctttttaattttgctggcttgagcggcagcaaggaggtccatgtactgcttgtaactgctggccatggcgacgtgtctaccagcggacggcacggaatcaggctggggcttgtgtagctggtcgtcgagcttcccgtaggccagcttgttgaacagctcttgatccatttcctttctcaaggcagccttgagcttctttgcgtctagcgtggctttcttctcggcggctgctttgttgtgcggcgcggtacccgggacatgcttcaggaatttctttattaaagccgaaaagtcgatgcgttcttcagcgacgtcgtcgtcggcggcctcttggtgcgacttgagcgccctcaagtgtctactaccgaggctttggagtggcgactccacttgagaaacttgggcttgctcagaatctgaagcgggagattgagcgctggcgtgggcaagtaggacgagaccaaacaccaactcgaggtgaggactattcggacacttgtcaaattgcgaaatgggctcgtcacgccgcgagtcgtggtcgcgtttaccgaatcggatactgtttcgagtcgtgctcaaaatacttatcatcctatcccatgagagcagcgcgacgcctcgtgaatcgcagaatttctggttgtttgcctaaacgcttgcattgaaacccactttaccataaaaatgaacaaaaatacacataaaaatgaacaaaaagacacataaaaatgaacggtgatgtcgtgccaatccttgtgaattccatttcgagtattctgaactaccgacacttcatcagttgcatacctatacattattcaaatttaactaactttatgctcccactgggtgcctgccaaaagggtcataaggacctaacatagttaccgcagatatgcgggtggatatgtcgacatatagcctagttgcacccgccacaacatgcttatcgacaacaactccgtccgattacaaatgcccaagtaccacctctattcgccctacagcgtcactttgctccggacattcctatggctagatctttctgcagtttatctcatcatgctcatttacgattcagcgctcttctgcccacgctgccgcggtgatggagctccagaatgatacgtgtggcgctctgtgtgtgctgtgcgaggcctacgtgagctacaacaaggatctgggcgctgttcgacgcgcgattcacaagcggctggtggaagaagatatatgacagcctgtcattcttcacaagaatgatggtcgacatattcaatacaaagtcgtagtaagtcgttaagatgggtacacggcataaccgccagtttatcgagacgattttccggtctcacgagatttatgttagctaatgccgagcatatctgctgcatttactccgggtcctacaacttgcacggtgccagacgtttcaccagcctggatctgcatgccgggtactggcaggtgccggtagcagagaaggaccgagacaagactggcttcatcacgaggaaaggactcttcagatttgtgcggatgcccttcggcttggcgaatgcgccggggacatttcagaggatgatgaacgcagtgttacggggactaacatggcaaagctgtttggtctatttagatgatgttattgtcttctctaaaggagatgtggcacagcacgtcgtgcacttggcgtctgtgctagaaaggttgtcgagcgcgggtctgtcgctgaaggcaagcaagtgtgccttcgcgtcgacacgtctgaactacctaggacatgaacttacggtgacggagtgaggccgatggcgagtttagtggacagcgtcgtacggattcccacaccgacagatgctgctgcagtgaagagatttgaacacatggcgggctactatcggcgctttgtgccgaatttcgcgagtaaggcagcgcctatgacactattgctacggaagggggttgtgtggcgatgggcagagccacagcaagaagcatttgagcggctgaagatggagttgacgcagaggcctcagttggcctacccggacttttcgaagcccttccggttggtcacggacgcgtcgaaggtaagcctggggccgcgctgacccaagaccagggtcagcgcgagcaaccgatcgcctacgcttctaagattaattcggagacggtggcagcgtacacgatcacagaattagaatgtgcagcggtggtttgggcagtcaaattgttagaccttacctgtacggacgcaagtttgagctcgtgacggatcacgcggcgctcaagtggttgatgacgtcgaaggagtggaccgggcggctgcaccgcagggctctacaacttcaagaatacgactttgagattatctacaggccgggctcgagcaacgccgtggctgacgcgttgtcgagggcgccggtaggagaagtggtaggagcatcggagcaacgagcagcggtagccgacggggcagccagcgacgagcagctgacggatcgtgtcattcgtgacgagcaggcgaaggatcgcacggtgaagaacctcaggcggaagggcaagtaccgtgacagggctattgtggtcgaggacgaagtcgtccacattgtccaaagtgatggcagtaagagagtggtgctacctacggcgctgtggacggcagcattgagagaaggtcatgactcgatctactcgtgccatttgcgcacgcctcagacgtacgagcgcgtggcgagggactactggtggccagatatgcgggcctacgtaaggagatgggtgcagtcgtgcagagactgcgggtcgaggaagacgaaaccgaaggaggtgattcccccgctgagaagtcagggcgtggggagtgcaggtgatcgctgggcgctcgacgtggcggagccgttgcccgtcacacaggagggcaatcggtatgtagtggcggcggtagactacgctacgaggtatgcggtggtggcggctgtgcccacgcacaccgcgccggacattgcgaagttcattgcgaacaagttggtgttcgtgttcggccccatgcgtgaggtcgtcatggacggtgcgccggagttgaacggcaaggtgttggacgcgttggtgaaggctctacaggctaagcagatcacgcctgtgccctacagaccggccttgctggggctggtggaacgctttcatcggtcctggaagcacatggtggcgatgtatgtggcagaggctcaggacgattgggattagttgctgcactgtgcagcgtacgcgtacaacggggcgagacactcgggcacaagctacagcccgaatgagctcgtgatggaaaggaagctgcgcgcgccgagcgagccgctccgcagcagcggcgtcacgcagactgggccgtttgcggagtactaccgcaagctggtcgacaacatggcaagggccacggaagcagcgcacgcagcgttggcgaaggaccaactgcgtcgcgagaggtactacaatcgacgtgtacggcaggacacgacgttcgaggttggagacttggtgtgggtgctcaagcctccacgaggcaagggcatcacgaagttggcccatcagtgggtgggcccggcgagaatcgtgcagtcggcagggttcgacaactgggaggtcgtgcgcgacgacacggacgagcattcgatcgcccactgcagcttcttggtgtcgagccgctgtccgagcgactcgttgggcatgatcgcggagaagatcatcacagagttggagctggaggacgacgacgcagagcggcggaggagcgacggcggcgacgaggagcaagtcgcagtgcagcccggtgacggccaggacgagggacagcacgatggcagaggtgctgtcgctacagcgcacgcgggcgctacagtcgacggaagagtagtgactgaaggccgagaagaaggccaaatgacgtcgcaagcggaggagagcagtgtcgcacggcgaagtacgaaagagacgactggtggcggagaatccacgacgggcggagcaggagagcccgtaccgacgagtgcaaatctggccggacgagacgcggaagagaaacgacacgatgcagtgggtgatgtgaccagtggagtagcgcgtgctccagcggtccgtgcacccagtagtcgcgaaacggcgaggacgacgccgggaatagcaacagcggccgcacaggatgctgaagatgtgaggacgagcttggtggcgcagcctaagctgccagtaaggaatcgaggacggaagcgcaaggtggaagcagatgtcgaagccaaggccagtgaagagacgaagcagcgacgacgacgagaagccgacgctcgtgaagctcgagcagcacgacggcaagccgcagaagcgaagacggctggtgcaaacagaactactggggatcatgctggtgaagaagccgatggtgacaagggaggcgctgcgcgacgaagtggcgaagggcaagacgagcacgtgcgcgtcggagaagctgtcggcggtgacgaagacgcagagggtcgcggcgaacaaggtgcggcggtggatatgctgcgcggacgaggacgagcacgatggcagccgccaatgccggagctcctgcaagtggagaccgctggctacattgttgaacgagcacgccggcgagtgcgcaaccgcgcaggacgctacgtgcgtgagcaccaagtggagtacagcactgggccatgacgaccagcgggacggcgatggctcactgaagcagagttcgagcagctcaaagatgctgccaaggtcgaggacgaccttggagccggggatggcgtgtagttggatggcctgtcacgtgacgaagggccacgaacaggcagcgccagacgatcgcgcgctggtgatcgacttgacagacgagtagtgtgttggacatcggccagatcgggtcgtggtgtacggcaggaggcgtgtggtgaagagggcaagccagtggactagtgccaccggctgaaggcggtcgtttagcaagcagtgggaggttaaagttggcgacggcgacgacagaagatcgcagtgcgtggggcgacacgccgggacaagggcgaagaagtatacgagcgaggataggcgagatcaaggagaggaacgtgaggctgtgaggccacgagcatggagaaggagtcgaagagggagaggtccagtaggtaggcaggcgcccatgcgtaggagtagatacagcggggataggattgagtaggaggataccgagcggcggtcggccgactcgaccctcagttgcggttttcacaggattgtggagagtcaagactaatatacacgagtggcgccgaacgcacgggtttccggtctttggagcagcgacgaagggcgtcggccaaagcgacggcaatagcgaaggtatggcagtgcacagatgagggcagtgttcgagtagggcggcaggactgtggagagagaccacgggggctgtggtgttggagcaccttggccgagtcagagaaacagaacttaataacagtttgtatggagacaatgaatagcctacagtgtggcgtgggcaccacggagaggtgtggaaggtcagtgggtgcctccagagtatcatcgatgcgaggtatggggtagacgttgcgcttcgtaattgcattgaggagcctgtagtcgatacaaaatctcactgtgccgtccttctttctaaccagcacgactggaaacccccacgcgccgttcccttcctcgatgaccccgtccgtcaacatcttctccacatgttcatcaacaatcgtctgctctgagtgtgagtgccgccgtggcctcactttaattggcgccttactccctgtgtggatctcatgggtcacgcccaacttcgtcatcggtgggcatccccctctcggctctaacagttcagggtagttccgtaagagttgtaatagaagttccctgtcgtgctcgtccatttctccaatgtccaactcgtcgtcgttgcttaacggcgtcttgttctggcacaggtcgtcgagccactgcttgactcggtcatgcccgtactcgcctgtcatctcaagtatctccacgtcgtctgccgtcgacacccacgtacccaacgcctcgcgacttggcagcttcacggatctgccctcgatgttcaacactggcacgaccaccctgcctccacgcactgtcgacaatgtaggagctaggaacaggtgtggctctacgcgttgggcgggtacgaacatccccactgtgccctcgggcgctgccactcccagctccacattacgacacgtccacgtccgcactctcgctgccttcgccagccgtactctcgccgctctccctggccgtccgtcgccgcccgagcactgaaacggcacgatcttcttcgcgtcgccctcgtaccacttcatcttgcacgagacgaagtcgatcttgacgctcttctccagcatccagttctcgcccaacaggaactcctccgtcgcgccctcgacgatcagcgcatcgaccgtcatggcctgctcgtactgcgtgcataacgtgaatctccacacgcccaggacgcgtgacactgcgcccgtaaagccctcaacatagtccactggaggtagcccgtgctgcctctcgccgtactgccgccatgcttcgccggccacactgtactgtgcgccggtgtcgagcttaattctccgtcgctcgccgtgaaccttcaccaccgccgttggtaacgagtctaccgtcggtgcctgcactgcacgcagcttccctacgcgcatcggtcgcgtcttgtcgtccttctgctccacgcgagagcacgcgtacacactgccgctgtggtacacgtactaccgtgtatcatcttcttgtcgcctcggtcgtcgtctcagcaccttcgtcgcgctgggcaacacgaacccaattgcctccgcctcctgtcgactcagcactcgctcggtgtcggctcccagtcgccggtacacttcctcgactgccttgtacgcgagcgttggctgcgtcagcttcgccagcgctgcccgcaactcacgccgctccttcacccttgccttgcgcatacgcttctcgtaacgtcgtctcgtcctggaccgctgcagcattgtgctgttctcggccgtccagtccttctcgccaatggcgtcgagccccgcggccgccaccaccagccgcttcgccacttcctcgcgcatcgcgtcctcgccgaccgcattgccagcagccagatcctctcgtcgactcgactccgccaccgcaaggtcagcgtagccatctttcagcaccttctctcgggctcggagttcctgtagcgcctgagctgcacgggcactccagctcaacacttctcgaaactcgtcgctcggctcgggcatgaccacatccgaccctgcagccacaccgtctgccagctgtacttggccttccctggggcctggcgcgggcgtcgacaccgctgccaccgtagcaccgctcttcgccaactcagccgccatccgttcacgctcagcacgccgctctcgacgcgccttggtgtggtcgagccgctttcgtcgcttgtggagctgccggcccatctcctgcttcgtcgcctcgtcatgcgcttgctgccgggccttcaccagcaatactcgcccttgttccttgtcacgcacgcgcagctccgccttcagcgtgtcgtccgtcgcgctgttggtgtctcccctgctcgtgcctcccgcactcatctcatccgcggggtccttcgagcccttcgtactcatagccgcccgcgtcgaccgatctactgactgctcgaacgccgccagcgctgctgccagctgcgcgtccaccttcttccgtagttcttcctcgtccagcctgccgtcgatccgaccgccgtccgtcgtcctcaacttgccgtagtcgattaccacgcgcttcccttccgcgcgctggaccaccatcacgttcacagccccgccgccgtggtccgccaccgcggcgctgctgcatgtcgcctccgtggtgctcttcgcgtccttcgccgacggcttctcgtcgccgtcatccacgttgtccgcgaactgcacgcgcttcttcgtcgacgctccgctgttgctgtcctgggcgttgggctgggaggccaccgccacttgccgttcgtcgtcatccccagtcttaagccgctcattccgttctttgctgcgtccagcgcttctcgcgccatccccagttccgctcgtaccgtcggtcactccgccgcgctcacgcacgtcattcttcgccgcgccatccccagactcgaagtgaccttgttgtcctcgacgtcctcgacgtcctcggggtcgtccgcggcctcgaccacggccttcgtctcgaccgccatctcgtcgccgtccttgccgttccaccaacggctttctcgccgtcttacccggtcctgtgcctgcgagcagtaaggccggggcccttacgctcgcgggccgtttcccgacgcctccgtagtgttctccgtcgcgtcagcggccgtgttctcgccgctggcgttgagatccgctgccttcacctcgcagtaccgcgcaaagtgcccagtgcgtccgcagtagtagcactccgtgcccggccgaggcgtgaactcgcgccgtggctgcgcttgccgctgcagataacgctgctggttcatcatcctgccctcacgcatcgcaagcgcagggttggacagctcgccactcgctccatcgccgccgtacttgccctcaaccttgattgtcttggccgctcgcttcgtgttctggtccacagccgttgctggccgttttcccctcgtctcttactggtcactgctggccgttcgaaatttcgaaccgtctcccaaactgccacgtgtacccaccgttcccgcgggcaccagctggaaccctggcggtatcgccttcgaccactcggtcgcactggctcctccagagctcacctgcctgccctccgtgtcgtacctaggcggcttcgccgccgtgccccacatgggcccgtagccagtcaccacactcccttgttccctgccagcccagactgttcctggccgccggctctcttcgcggccccctgcacgggcccgcgtccgctcgacgtctcgcgctcatcccagcgatccatcgccgtctccaacccgacgccgtacccctcgccatactcgccgatgtggggcaccgccaggctcactgctttgtccagcgtctgaggcctgtggccccgcacatgggtcgcgccctcggggctgttcatccccttcaagaaggcattcaccagccaatcttctccgacgtcgccgcgctcgccgatctcgcgcagcgactgcgcgtactcgatcaaccgctctcctctcatctgtcgtctcgcgttgagtaggtcaaccacctctggcccggtgcgttgcgtcatgtacttggcgcgcagcattccggccagggtgctgatgctctcctcgtcttccggcacggactccatcaccgtagcgagtcagcgctgcgcctcgccttcgaggtgcgaagcgacctcgtggtagagctgcttctcttgccgcgtgacgcccatcgacacagcctggcgcctgacctccgcgcgcaccgtcttgagccacatcgtcacgggcatggagtcgtccaagcccttgaacttctccaacttcagcgctttggccttctcgcggacgatgatcgaccgctgaggagcactctcacccgacggaccatgcccactcgatgccgccgccgctgtggacgtggttgaggtggaggtggtggtgggtgtcccgctccggcaccgccagcaccgccactccccgtcaagtccaccgtcctctcctccatcgtgcccgcgttcgtgttcgtgttcgtattggtctgctgaccagccgtactcgtgttctcgcgaccgctgccaccgccgctcgaaccgtcgccttgtccagctgtagggtcgccaccttgacctccgccaaggtcgcgttgtccagcgccgcctgctgccacgggcgtgttgcccgtcggacggcgtatcgcctccgtactcaacgtcaccgtggcgccgtcttccgtttccaaagtcgtcaccgtcgtcggttgctgggggagccgctgttacttcgccgctcgctccgccgacgcagctcggcgttgagcccgttcgtcacgtgccatcattccctcggtcgtcattccgtcgctagtctgttaccgtaatacaaagatcgttagcccatcgtacacttctcggctccttatcgtttccgtttcctctctttccgccacgggctcagcccactgaagccaagccgccagcgccactcatggacactgcccggaaggcccctggatgaccaccatgtcgttatctccactccaggtgcccttctccttgcaccgcgttggagggagatcgttaacacaagctgctcacctaagcacctagggagcgtctcggtaagcagggtctcttccagtgcgaggccgttcagtgtcgaccagacgttactggcctgcacgcatggctaggatagggatggctaggaggaaatgttataagcactagtggtcgggtagcaccactagctgttcccagctcgtaaaacccggttgtatacagcaggcagcaagagcccttcgcacactggcacatgcgagctccgcgccactcggccaaggtgctccaacaccacagcccccgtggtctctctccacagtcctgccgccctactcgaacactgccctcatctgtgcactgccataccttcgctattgccgtcgctttggccgacgcccttcgtcgctgctccaaagaccggaaacccgtgcgttcggcgccactcgtgtatattagtcttgactctccacaatcctgtgaaaaccgcaactgagggtcgagtcggccgaccgccgctcggtatcctcctactcaatcctatccccgctgtatctactcctacgcatgggcgcctgcctacctactggacctctccctcttcgactccttctccatgctcgtggcctcacagcctcacgttcctctccttgatctcgcctatcctcgctcgtatacttcttcgcccttgtcccggcgtgtcgccccacgcactgcgatcttctgtcgtcgccgtcgccaactttaacctcccactgcttgctaaacgaccgccttcagccggtggcactagtccactggcttgccctcttcaccacacgcctcctgccgtacaccacgacccgatctggccgatgtccaacacaccactcgtgtaaaagggttacacgcacaagtggctgcagtcacttgcaaccctaacagacacgacgtctgttagaggttcgaaagacttcctcgaccttggtgtagacacaccaaaggctacatacatttacgaccaccacgacgggtggtccatagagacttaggattcctattggctgagagcagcatctcttagccaatgagcgacatgcatagcattggaaatctgccaaccagccgttggcagattcctattttaaaatattacatttagaggaagtcagaaacataaaacaaaaatagcagttctcattttaacccaaaaacattatttggatcgtttatttagattaatctatgctcggagacccgagtataattaactctaatttaaactaggctacgcttcctcacatacacgcgcacacgtgtaagccaaagtagtgggccaaagtaggcccattacaactcgtctgtcaagtcgatcaccagcgcgcgatcgtctggcgctgcctgttcgtggccctttgtcacgtgacaggccatccaactacagaagcatagcagcatgcaacatgcgacttttttatgcgacgatatgcattttgtttggttgacacctgcacggttaattctgagctgcaatgcctctcatcctagctctaccgaagccgcgtcaggatataatgtgaacatgggctttcagtccttatcgagtcagagatctatcaaaaggcagttaattaaaaagtgcgcttccaatcgtgatatcgccacttcttcacttctaccagattccttcagatgcgctaaatcgtggccgtaggctacggctacgctgaactacggcccgtagctcatgtctttttcgtaccatctacggaataacgtgaataggtcgtcgtcgagcattccttgcgcatacattctatacagcttgtcttctttttctttttgtaaagccttcgccgctttgtaggcaggagttcctggaatggacttaccccatttcttcaccttcgccgacaacacgttcgtatttcgttcttcagtgtcgcatcgaacgccctcttcctgtgacttgagttccccgccgttgccctcgagtggtggctcagttcgagaaacttggcgcatttcctttgccgtagattgtgcgtagacaccggcaagtaggacaacgagcagcaggaaaatggtcaaccgcatgacctaccaactcgtatcctttcgctggatcgaagaggaagtgaggcttcgtttggtcttatacgttgacagggaaagtgagaaatgagcgagctaagtcgtaaacaggacattgcacagagttttgatcgcatgtggattttgcatgtggtttcatgaaaccagtgtacagcactgaaagcttccagtcccaatgtggctgatcattatttcaaaccagctaaagataataggcttcgtagtctattttctgtacaattgtgcactgtattcgccaggcttggatcgcgttagatcggcatgcacctcatcagcctcgatgatagtttttgaagtggtaagcaacacgtgagatgtgaataaatatcacgagtgacccagttagcgtcaaacttttcatcactgaccctttaagggaacatatgtttaaattacttgcttttactatcgccctgcacgcgcgatctcctaaaccctaaaggctcgctacgctcgctcggacagaaccctaaaaagcccgcttcggctcgcacgcgtcgcctccgcttgctaggagggcaatgctgggccctgggtttgcatccgcgtgcttcgcacacggactgccaaaccgcaggctggctcgctgccaggggcggacccagaaccaaaatctgaggggggccgggccaaaaacaggggggtaagtctatatgcggctcaaaaataggggagtacgtcgatccgacagctcagaaataggggggtaagtgtgatgtcttcccaaaatctggggggggggggggcggtgcccccctagtttgtatgtaggtccgcccctgctcgctgcgctcgcttcatgaaagtcacagtagcaaaggcccatcggaaaacatatgttcccttaaacggtcagtgatgaaaagtttgacgctaattgggtcgcacgtgatatttattccgtgagatgtttccctctgtagtgtattatagtgcaagtatgccccccacttgcatactgttaatcaatgcacctgtcgatccactttgcaatttgcgttccatccctgatctatccagcatgcgtatccactacgccctgctactcattgctgggttcgaccttgcccttgccagtaatacctcccctgtcgccacgcgatccaagatcaacgcctcacctacgcttacggcccagcctgacatctcgacccaacggtcctcaaggattcactacacggaagagggagacgacagcgaagagagtccccgggtttttgccagatgatgacactatttgataagtctagacaaatgatggcactatctaataattgatagcacttgatggcactctatccaattgagagctcgacggtgttcattagcttcacaccggggtgctcattaagagttctgtgctgtggcaagcacggcgtagcaagcacgctatccacatggacgaaaacaccctgaccagtaccgatgggcaaacgatcgactttcgatgaaactcgagtctcgacaagcaacaaatgagcacatcaagaatttggctgaagaccaacagtggccaaggttcgacatcaaaagaagtggttgccaatagtgatgaaacaccaagtcatgtgacagcaacgcagcgacggatgggggctgcggtcggctcgttcataatgcgcaggcatgctcagttgaagtgccattgaagagtgattggagggcaaaattaagagtgccatcaatttttagatagtgccatcatttggcaaatgccaacatcatttgtctggacttatcaaatagtgccatcatctggcaaaaaccctaccgtaacatgatgtagacttgtcgtatggctggctaagcgaaacctgaatcgcgtcaacgctgatggcatccatacaggtgtacagaagctgcgagtaatagaagataaactccgtatatcttcgtaatacatgtaccgaatttgttttgtagagggatacaccctaccggtgctaaaatacctgacgcccgattttgctcaaaaaacgaatcggcaccagacgcccagatgtatttatcaaaattactaaactgagcactctacctcgtctctcaaagccgaatctcaccaatgcggctgccgacacagcccaacttattagcttgttcgccgccaccaccccaacttgagatcgaagttcagtagagcaagctttgcgtttgttcctgccgccgacagaagcaccctcaccaccactcttcccccttgatacttttctgtaggtagacccggaaagaacgtatcttcagcgaaacaaacattgcagtgtagtctcaggtgctcgaccatagccttcttcattgcagcagtgtaaaatggtagggcccgcgtcgttttccacctgccttgacctctagacaggtgagggtgacttggtggcgcccgcgccgttgcagaaatgatcgcgcgctgagcggccgagagtgcaaaaattactggcttgaaactggtgtatccctcaacaagtcaagccctgtcaatctgaagacacaattgtgattggctaatactatcctgtatcccatacgtgggtgtatccctctacaaaacatattcgttaagcaacactgtgctctaggctaggcgggctgaagcagggtgttgataccttcgcgcaacgtcaacgtcgccgctaattttaagcacgaaacgactcaagagccggaatggctacaccatgccccatattcccaaccctggaagagcacgactgaagcagggacggcaatggacgcctgcatcgcccggggaggaatctcccacgttttatcgcaggtagagggagagtcaaggctgtacatccatggctgcaaacggaaactaacccttcattctggggacaggctcgagcgtcgctcaagaacccgtctcgcccattcacgccgcagacctccgctcgacctttattccacggagatgactatcgcccagggtctcgtccgagctcttcgtacacagtggcggagcttaaacaaatgactcaacagcagacccagcagacgcagcagcagaaggtgataccgtctgtggccaagccgacgaagctcccgccgagaccaaacggtctcaagcctcggccgcctgtggctccgcaatctagcgagaagacgtcgctgaccgggtccgcttcatccagcagcctcaagttggtgcacgcgcccattttgtcagatgacgagtcgaacgacgagctatcggctgtgagccctgggccctcagagacgcagtttgatccggaggcctctctgtcactcccgtccaatgtgagggcatgcagcattttttttacaaggacaatctgcgggttggtctaatctctcttaaccttttgtgctgttgcaggacgagctcatgcactcgtacggcggaattgagcgctgcattcgcgacttgatcgggcgagaagaagctccggagtttggtgacagcgtcggtcgtttacgagagctggtggacggcttcgtgggtctgagctctttcctccacaagcaacgctcgaaggcagagccgcctgaagacgccgcagcgtcaaagcttcggtggcagctattcgactcgctgtcgagtgttctgctggaaagttgggtcgcgaacgcagtctgcgtacaggagctcgcacccagtctctttgacttgtacacttctctacaggctccaacggatgagcaggacagacccagcgcccaaatgatcaagctgggcaagaccctgttcgtcctcagcaaggacagcgcgaacgacagcgccttctgcagcgtgcgctacgttgaggcagttctccacgcgatcgctggcaccagcgacgaagcttccaatcacaaggacgataaacactcgaaagcccacgacgacgccattgtcctcccacccaagcagcaaacgatccccttaaagaccttgatctacgcagcggggaccttgaagaacatttcgagtgctgaggacaagatgtctcgcctgctagccaccaaccgcgctattgcgatcctcagtgagacgatgttgtggcaggctgaagggggagatcccgctcaaaccaaagagatcgctcagttcctgattcaaacgaccggaattctacgcaacctgtcggtctcgaagtccaaccacaaacagttcctcgaagcccgcatccccctgcggttgtgcggcatgatcccagccttcatctcccatcaggaactcatggtcaacatctcgcgcattctgagcaaactcacgctgcacgagctgccacgcgcgcagatcaaccagaggcccatcaacctgcggaaccttatggcgttaatcaaccatcgtcagaactcgtggctttctctcgtggaccagcaacgctccgacatgcgcttccaggacttgctcttcatccgcgtcttcttcgtgctgggcaacttgtgcgccggcaacgaccagaaccgacggctgattgtcaaaaacttttcaggtgttgaagttttgatggaggtgctgcaattctacgctgcccgctattcggacgctcgaaatgattccgaggacgagaaggacggacgtcgtcatgcttcagaaggagaacaatccatggaggtcttgatcaaactggtccgtgtggttgcgaacctggccattagtgccgatgtgggagctcaattgaacgcgagcgagagtctgtcgcctctactggagattctggaagtcgctcaacgcgcgggtgatgaagagatcatgctaaacgccgtgagctgcatcacgaacgtgtcgtactatagcacgccgcccactggtaacgctaacagtgatggctattgctttattgagagcaaccgtatcgctatcacgcagcttctgtcgaggattctgctggacaggaacgaagaagcagtggtcgaagcggccagagcgttcggcaacttgtcgcggttcaaagacgtgctggcgtatatgggcgagctcaaggtgctcgactgcctggtggtcttgctggaccacagcaaccgggaggtcgtgtacacggtctgtggtgtgttgatgaatgcggcgctcgatccgagcacacgcaaaggcttactggcagttcgacccgctgttgacaacgacacagttgatgtccgcaaccttctcgttgggatagtcgagtgtgccgcggcggacgacttggagatgacgctcatcgctagcaaggctctctacaacctgctgctctcgaaggaccacggcgacggcaaagctaactttacggctgatgcaatgagcctacgacgcacagttgaagacgttcttggcactatcagcaacggcaaaagggcgagtgaaccgaatgaagacgatgaagaggaggaggaagagggagaagaaggtgcactgagtagtcgacaggaacttcggttggtgcttccacagcttttaaggagtgttaactcgctcgtgagtgcaacttaatacaccactgctcttgctctctacagcccaacgtgcctaaatcggatcaacgcggctttgttgaggagaaaatagcctctctactattagcaggcagacgactacgtccaacatgtcttcacatggctgtgagcatgcgataaaaatgcaactgaccagcttggagcttaagacatcgccacggttctgtctgctcgatgaaggtgcagcccgttctgcatcatgaccgcctgaacgtaagatacagccaaccccaaagagtacacaaccgagtcatggacctctggcatcgcagccagatcggacaccgcagagcgtcttctggcctttcgagactattaccgacggacttccgtcatgcgtgtcgtggctgtttgcgtcttaacccccattcctgccatggctgtgaccatcctgatcgattgcaccccactgcgacctccatccgagggctggcgagctaactacgccttctggatccgctggtttctagcgctcgttgctgtctcggcaggtgcaacagctcaagttcgggagctcatttcgcccggaaccatctcaaataccggagcggtcgtgatcacgctggcaacggctacgacggacttactggtagcgatgatgttagcagctctgtggcgatttccgattccgtttggctacgttatcatggtcggaccgtacctggtgattctggtgggcttcacgcttttagtggtcggacgacgctcgtttgctgagtcatcaacgctcgtttgctgagtcatcaacgttccgtgagcagcttaagtcgcaggctacgataatctttgcacaaggtgttgtggcaatgatgtatcccttcctaacagcagttttctcccgactatcggggcctcagcagactgtgctggttgtagtgatgcccgcctttaagtacgtgacgaaacacgtgatcgctaacgcagcggtgggacttcacgaacacgtcggcccgattgtggtcttctcggtagatgtcttcagtgtgttttacgtcgccatgtgcatgcaaatatccaagacgatggcaacgacactcctgattattgcattcgatagcttccatgttgttgctgctctccgtgatattcttcgccaggccaccgccatccaaacacgtcaagaggggaaaacgagtgacattaattatctggaagaactaacagccatggcgcagacacttttcgaaggtggcaatgcatcacggcctgttaaagctattcggatactcgctccacgccccctatatctctcggatgaaagttctactttccttaataaaaagaagcagacaacatatccaaacttggagtaaatcgagagagatcaagtcaggcccgataatttttgccataggtccaagcaaaataccgagcgtggaccatattcaagtacctctggccagaccaagatcgagatctgcccctgcagctcgacaagtccaagggaaaacgtttcaaaggaagtttactcctccgttcttgtcacgaatcccctcagcgttttcatccgacgtactacgctccagtgggcctttgtcgtcagagaaagaaatcgttcgagacgcccttcaagctctcttccactcggagtatctaatatattgaatgtgcgctgccacttctgtacacagtctacttgacgaccgttttccatcttccagtggcgtcataatacccacagacggcgtcatcgacccccaagaagttgagcaatgatgtgatcagcattttgagcttttcaacggcagagctcgttggattcatcggtctcctcttcttccttagacgtaaattcggcatttctccgctgtatcaactggcgtttgtgctggagacgcaagttcgcactatacaaggccaccttctcgtatggactgtattcattttgcacatgccgctgatgcattatggtaagcctcgctatcaactataacgcttgacccaactttaaaactgacgcatgcgcgtgaatgcgacataggcgtagactatgacgttcagttcggctgaatgctcctctcgactggaataaaagacagtcgatggcctggcgatataaagagtgatccaatctagcagaattcgtgaacagagttggttagacagcaacgtcgattttgaatgtctgagttctttatattttttcaaaaaaatatatctgtgcaactcaggatggtgggaggagcaagagttttaggccgatcttgctcagtgcagataaaactatggcaccccgcttcgacaagtattatttccttcttcaacaaaatcaaacccttaccgacatgacgctccgccggctcaaggttcaaccaaccacctccattcaagaggattcagagcaaccaggtggagggctcaatgtgattcctgcagtataccactggatagcgacgtattggcaccgaagtcagattggacaccggagcgagtactccgtcgagcggctcctagctttccgagattaccaccgacgcgcctcaatcgcccgcgtcgttgctgtttgtatacttgcgccaattcctgctgtgtgcgtggcgctgctgatcgactccacgccactgaagcctcctagcgacggctggcgagccaactcgaccttcttcctgcgttggtgtgctgcttcattttttgttgcgatcggtgctacggctcaacttcgagaagtcattgtacccgggaccctctccgccataggcgcagtattgatcgctatcggaactgccgtcgtccacatttccgtcgtgatcgctgtcacagcgaattggcgctttccgattccttttggctatgttctccttatcgggcccttcatgatgatctactggagcatcacagtgctggttatcgggccccgcgtaattgccaactcgaaaatactccgtcaccagatgaaaacccagttcatgattgtctcggcgcacggactagtgacgagtacctaccctattgttactgcgatattccaccgactttcaggcccccagcaaatcgccttcgtgttcgttatgccctgatcaagcatttcaccaaacaaatcattgcaaccgccgctaaggattttcacgaatacgttgcacccgtcgtagttttctctgtggatcgtttccacgtcttctacattgcaatatgcatgcagatagcaaagtccacgatcacgacgttgatcatgatgacttcggacagttgcttgtcgcacttcgcgccatcttccatcaagccaataccttgaaaatgaggcgaataccgaagctttcagccgcgttgcatgctcatcgggctttaatctacctcgaagacctaccgggaatgatacgcaatgtgtttgaagaccctgaagtattggttcgaacctcccgaagtcgcgtattcgcgccatcttctctccctctgtcggacgagagcgtttgtttcatgaatggaatcacaaagagtatgcgtgacgctcatgtgtacgcctcatctcgattgcatgcatggtgcccggcaaagattgagcccatttcgcacattagtggcgggggctaccgaaaacagaattcaaaacggagttttcgtcgtcttgtttctctacaaaccgtcaagggtgtaccatcccccataaatgctgctgcaccaaaatcattcaacgcaaactaaaattccaaggaaagagtcgattccgagacggcttctcacgatcatgcgcccagacgctgctatttcatcgtatcgcctacggtctacattgtctcggcgggtgaacgaggacgcagtttttgacgccctccaagctctgttccattccgagtacctgctaatggcggagtatgtggaattcgctcttccgatcctctacgcggcgtatctggcggccattttccatctacctgttgcatcttactacccgcaaaccatgtcactgacttctcagagcttggcaaggactgtggctaccattgtagcctacgcagcgggtgaatttgttggattcgtagtacttctcttcctcttgtggcggaagtttggaatttcaccattgcaccagcgagcgtttgccttcgaaacgcaggcttgggctctacaaggccaaggactatcttcatttcccacctacggctacaacactacggtacggatattttctcgcccatcccttagaatcactgctaactgtatgctggtattgatctaggcgtggactttgatgtggacctctgataagacgtaccgcaattccaaacgaaacggagtcgtcacggcacttccgattattttttgttagccttaattgataagaagcagaagaactcccagccatagcgcgctgagagtgtttgatccagtgatcaggcactggacgtaagagcacgagttagacgttgaactccttcttctcgtcgcccgagccggcgttcagcaggggagtcgcctcatcgcccgatgccttgacgattcgctgggtcttcgagagccaaatggtgacgaccagcgctggaagtgacagcgccacaagaagaccgatggcgttcccaaccacgcagtcggaggccatgtagcccttgacactctcgccattgagctctccgtccacgttgcagctggcgttgaacgagagcttctccaggatcccagcctccacggtcgcgacaacgagtccaacaatcgacaggccaatagcaatgtggtaggggccaatggctgcgcggacatcctgctgcgcccccgggtagaagaagacaatgaaacttcccagccactagacaacaacatcaacatcaagccagcctcagctcaaagcccctcatctagagctacgccgtcacttacgtgcgccgcaaagaggatcaagaccgtgagtccgagccagctgtgcagactgtagagattggtgatgccgtgctcgttgtggaagcggaagacggccacagtccccagcacggcgctcaggaagcccaaggcatgcagcgacaagtggatgcgctgcagaacacacacacaacaccatcatcagtcttctctcacgccccacactctctctatagaaagctcaccttgttgactgtgtggctgaagggcagcgagacgtaggccagcgccgcctgcatggagcagaagacgaagccgaagctcatgagcagcgggtgccagttgaacacccgcgggtctccgtaggcccacgagaagccggatgtgtctctggccgtcaccacgccgtccttcgcagcgtaggcagtcagcccgctgcccatccagtagcccatgagaaccaccaccagcgccggcagcgtctgcagagtaaataatgatccagtccagacaaaaaccacatcttttagtctacgtccttcaattctcggcggttgaaggcgccgtgcagtgcattagaatcgtctggtgattgtgcgtcgagtgagccatgagggggctacgtacgtgagctagaacacgcgctacgagctccatcgctttgaggaattccgggttctggtggtctttctggcggattgtcgaacgatgtggagaacggtccgacgcctgcgtagatcgccaggtgattggctggtttagcgctggatggagaccgacctgagaccgccagaacgtatacatgtatgtgtgtactaccttcataccacccagaaactgcaaaccatataaattcatacccctgtggaatcatgatagctggtcaggagggagcgcccgtcacattgaagtaccgccactgggtggtctacacatcccattttcatttgaatcatcccgccaaaagcatggcgcactttttccacatacaaactcaaggcagcactgagcacaggatgcccggcctccagaggcgttctaagggcccagaagcgtaccaagggtgtgtgtggctaaccatccagcagaagtgcgatgttattgaggagtacaaccgccatcaccctctctcttagaagtaaaaatgagctttgaggaaatagtggtagtaacgcacctcaatcacttatctccttagatcatataatttcctgtaggaaattggatgtaccactctttgcagtttctgggtggcatctgtaatgcccctttcagaaattccctagcggcacgttgaagtcgacggttgcctttattttggctcttatgccgatcaggtccaggatttgaacatgctgattgtgagaccgaatcgaaagacctgaaccaaacattcacagctctggatcatgacatgacttggttccatagcgcatgctccgttcggcttcctgctctaacaacagttcatgaagctgtctctaggtgttaccatcacctacaatcggatagctagaacgagtcgccgccgaaatcgaacatgtctcccttatctacttctcttgacaacaagattcgctgcaatatcacgcgctattcatgcttctatgggtggtgctcaagtgtatcccattcgcgactactgtacagtgagcactgtaggagccttttagtcaaagcagtgcacacctgggttggtgtccgttcacacactcaacagagacactgcacggatggcaattggcgcatatctggtttaactagtttactatcaaataacagcggtacgtatactttagaattgctagccatgacgaggtgatcgacatgtttcactcctgcttggctgggagaaaattaaagcgcttcaactcgtagcgagatgccacagccataggactcgagtacggttgtccactgcggcggtaagcgggagatatcttccgccgtcgcctgcttgctttgtttggtgtccatagcaatgtttgctaggccgtccgctggtttttgaagtgccgcaggtgatgtgaccatgaagacaccatcagtcggtccgccagcacccggcactgtccgtaaagcccttgtaggtgacgagcccttggtacccgtcgcttctgcaattgtgttaggatgagattgctgtcgccaacaatatgcaatcccaccaattgagtgccgtaccgcataacgcaggccgttaaggagagcgcgatattcagcgacgttgttcgtggtcttcgacacgtaggaaacgctggccagccagaggacggcgggctggaggcttgcgccgccaagttgtaggatcaccgtccccgcgccagcagagccgggatttccacgagccctgccatcaaagtagagcagggtgtgctgtgaagtcggagcggggcgtggcaggctctgcgtctccggggatggcgaagtgagcgcgagatggcaaatccgtgcagccgccccttggtgcggactagccgttgtggacgtagagtggatccgaacggttaggtatgcggaacgaaggcgtccatgtaggacggcagccgcccgtttcaatgacgcgtcctccctcgggtcgcgatataagcaccttctccgccaaatcccttgcaacggggtcaccactccaagccgccagcagaggttgagtatggtgtaaatgtgcccccgaatggcttcacgcgtgccttcgggctcatgacgatacacggcatccagtagcgtccagataccgggtggtacggtctcgagtcgaagtcgaaaagtggacgagatcgtggcgcccgttgttccgacccccagggacgtccatggggcataaagcacatcccagagtgtagtagctcccgcacacgtccagaaagtgtggcacgtgttcacgtcccgttgcaagcattcctcgactggacacccaggcaccttacgcgtcgagttccaccaggtaaaagcttgtagttttagacggtacaggacctgctcgccccagctcgtggcccctgtgatgcgtcggatatctcgccacgtgacgtgagcaagcgcctgagcaatttgagggtgatcttggagccacgctgcgctccgtcctgacacattgcgtttgccatgtcgtccggtcgtagcagttacggccagtttgtagacgtgacgtgctcgtttccagctccgccgacccgcccatagacataccatcctgtccagctggggatgtgggtgaagatggcgaacgttcacttcttttccggcgaagtcattaagggcccgggttgcgtccagtcttgaagcagcaacaatcgtgtacagcgggccagtcaccgagctcgccacgtcgatgctcacagtgatcccagtgtcctgattgctgggagcctggacaaccaggggatgttgcacgggcagcgcacttactctcagctcgggggcgcagcttgaggcgtagacaagctctggatagtgcgccattaggtccagtagtaagcgacgaatctcatctccctcgacgcgcgaatccttgcgcagtattagccgtcccgtagtgatgtgtctccaactgacaacatgatgtagtaggcgtccaggcgttgtcgttctggtggcgagtggtccatatcccagcgaagcaggaggcgacacctggaataggtgccggatctcagcgtagggcagccactggaggcaaggctgtccccccgcactgcgtatggcgtggcgcggactggccgtgtccccgcccgctagacgcagcacattaagctcgcattgattgatcaccatcccagctcaatacggctggcaatgccacatccacgatttcgtaaacctccttcacggcggcctcgtgtcgaggcgacagctgagggaggcccgcacgatgaaccattccagcaccagccttccacattgtctgcccggcacgaaagccccgcagagactgagtgttgacactcggggttatgtaaatcgggggtgcggccgttgtcgcgatgttggcgtacaggatatctcctagcatgtgatcgagaattgatccagagagcgcccactcggagacagttgtggccgccatagagagcagttctgctctgaggtcgggaatcgcgatcccaccttcacgccggggaaggcgggtaatagccgctgcgagccacgacgtggcgccctccacactctcagtaaattgaccgtgaagtacgagcaatgtccctcttaacgcgagcgagaccgagactttgaattggtcgaggggtttgttcaacttgttgtagatgccccaagatgaggatccgcgaggatacgtacacgtggctgtcgcgtttgacgcgcgtgatgtggttcatgaacgcgacgctttcatccgaaagaggaagggggaacggcgcggagacgcggatccgacgacttcgagcgtgagagacctccgtgtcgccgaagatgctgcggatcatttctggaaggtctcgaaggtagttgagttgagtcgatatgggtcgaccttccagtgctaaaacctcttcgttagtactagcgacgttgacctgctggaaaatggcgcggagagcgagaagcacctggaaactgtcggacgcgatcatgagcatcgtcgtgacggtggatttggccgtttgcatgcaaatggcgacgtagaagacgttgaagagatccacggagaagacgacgaccagacccacgtactctcgaaggccttcagcggaactggcgatcatttgcttggtggcgaatttgaggaacggggttatgaagacgaacgcgatctgttggaccgctgagaggcggtagaatacggcgctaacggtgggaaagatcacggccacgaagccctgagtcgccacgatcttgagctgagactttatctgcttgcgtagaaccggagaggacgccaacatcctcggaccaaccgctagaacagtgaaactacatagaaaaacgaccatggggaccactgagatgacagcgaaaaacggaatggggaagcgccacatagcggctactagcatagctaaagagacataggacgccgcagttccaaaagctatcgcgaacgctgcagtattcgagataatccccgtcacgatgacctccttcatttgagcggtcagacccatcgcgacggcaaacgcgtcgagaaacaagcggatccacaccgtgtagtttgctctccagccgtccgaaggaggtctaaacgggatgcaatcgatcaggagggccgccaccatggcaggaatcggcgtgacgatgcaaactgctaaaactctagtgatggaggtgcgctggtgatagtcttggaaagccaggagacgctcgacggaatactggcttcggtggccgatttggctgtgctgccacgacttcagtagctggtggtaggctcgaacgagtccattgggattcttcactactactggagactgctgttggtgctctttaggtactacgctgctgccggaaaggcccatttgaacagcttcacgcttcggaggtgagcgtaaaccgctaatagcattctgaatacctcgctgaccaactgatcgagttcggcttcacctgcacgtcgccttctttatttttattcgttccttatgcctcaaccctggaaagcaaacacaccggctcacattggataatgacgaacagcgcaggatgctaatcgcaaatgagaaatgaatggtttcttcttcatttcttgatgatttatcttcaattttgtgctctcgatcccgaaaaaaaatcaccgttcacagagataagttgaagtcaacaccttggtccagcgaagcgttagacgaactaccatgggtggcagcacggtagggaatcattgtacttaccgtagtgcgctaacggcaaatgtaaaatgaagatcgtccatatgaataactggccttgcacaatgcggacttgcgtctccagcacaaacgctagctggtacaatggtgagatgccgaatttcttgcggagtataaacaatagcgcgataaacgataccgctgcaaacaataaaatactggccaccgcactctgcaatttatggggagtcgtgaatgccgtttgtggataatacgcagcgacgggtaggtggtaaagtatggcgagatatcccgagtaaagtgcaggaagagcgcactcaatgtactcgcccagaagaaggtactcggagtggaagagcgtctgaagagcgtcccatacagcttcctctgcagcacttttcaataaaacagcttgtaaggcgccggacgagatggttgtatcggcgttcatgagtgtgagaagtctgcaagtcactgagcctttccgactcgtagtcttttggtgattctgcactccaggttgaagcttgagacttcgtttagatggaaacctcttaagcttcttggcgacggctcctgtatttaaacctctctcccgggtcttgcgacgaagtgaatcaagttgctgctttcgcgctctgtggttgaaactacagtagaccttctggagcttgttttgctgctctgcagttctgaaagtaggtccctagaagaggcatacatgtaaagcttacgcttcgcggtcgtgagttcgtccatgaacacgacgcttttttccgatagcggcaacggcaaacactcgaatgcgatcagtggattcatgtgcattgttgaatacgcgctggatcatgccaggcaggtcctggaagtagttagtggacggtcacggctctagtcttgacggccctcaattggtggtaaatggctcgaagtgccgtgacgacgtgaaagccgtctgacgcaatcatggccagcgtggtgatcgccgacttggacgattgcatgcagaccgccacgtaaaagacgttgaagacgtccacggagaaaaccacaataacgccgacgtattcatgcaaccccttggttgcatttgcgataatctgttgggtgcagaacctgatgactggagtcatcaatgctaatacggtttgctccgcagcggaaaggtggtagaaaacggcaccgagcacgggaaacaccatcgtcactgtgccttgattcgcaacaatcataagctgcgggagcagctaaggagctcccatttccggagctcccatacacaaacaggccaaccatatgcatgtgtaactccatgtcccagcacttcaagctcaactaaacatcgaagaggactaacgtggtttaccaattcatgacccgccagcagcacctcatgcgaaatcgtcgatgacgacaccaatattagagcagcgatactacaacgctagcatttatacaagcagtcggtacgctaaattttgagggtcctcgcaccaatttatgagcaaatatgagcaagcaacagcgaagcaaacaaagcggaaatttatttttttatgacgcactgaccagatgttggaccgacgcgatcccatacaaagtctcatatcaaactcaaaccgtcgcgctctcgatgatgaacagcggctccactgcaggcacttcggcgccattgttgtcacgcgcttggagtgcagctcctgcaccattgcttgtcggaccagacgacgctgcattgcagcgatccatgtcactagatcggcttcacactcgggaggcagcaggggggcaggtccgggccgttggcgctcaatagatcgaccttcgatgcacgcggcgactttgcgctttagtgttgacaacgacactggtgacgagtcggccacggctgcgagcttctctcctgtgaggacgcggtcgatagcttcttctagctgcttgtctgtgaaggccgcctttatcttacgctcgactcgatatctgacgggatcagcgtaaggaaaagtgagggccaagatctggttaaaaaatattgagccaatcagagcaatattagtccaaataagaagattggattggataatagtcgctttagtccatgaactggtcagaggtcatgaactggtaaaccacgttagtataaccattatagtttttatagcaacggggccgaacgagctaacatctcacataacgagcgtgctgtcgctgccgatggaggcaacgtgagggacacgctcgttagggtcagtgccactcacaatgatgtcctcgcatgtcttcgacttcaggtcgtagtggacaggtgcatcttggcgtcgtcaccgtcatcgatgctctccgctgaccattacttgttgcgcgaagcgacggagtcgggcacgatgtcaccaaagttttggctcgcatgaacactctactgccactacacgtgggccctagcaaagatgagttcactaccggtacatatgcttgacgacggctcgatttcctgtaaccctcaccgatcacgagttcgcatacagggaagctaccggcacggtcttcctagaggtcagttactctgtcggtagcacgctcgacgcaatgtgctggttcaggaacaacaacaaattgaccaagtaacagtctaatgcaggtgttaagagttcaaggcatcaatacgtagataaaacttggttacttaaaaaaaaatacatttaaaaaaataatgtatcgtaaggtaacttctacgacgactcctgcaagataaacacgagcgtcaagcttgaaaatacttctcaagaggagttggtggtactgctagagcaccaacgagactaactgcgcaatctacaagtcttggacaataccgtttaattcggagagtacatgcgtgtggtttcggctctcacctttagaggtatatacatgacaacggttgctccgttatactacgtagtacatgcgaccagtatgcagcaaagttatagtcgactcgttgtcgcgtgggcacacctgtacttgctcacagtcttccaaaatttaccgcagtggtgagcgttgaacgcgccaagcaaaactatgacactcgctagagatttaggagagagcatgacgcaacttcgcgccgacgacacgtactacgttgccgtaaggatcatcagcgtttgaaacaagctcgtccggccccgttgctataaaaactataatggttatactagtcctcttcgatctttagtttagcttgaagtgctgggacatggagttacacatgcatatggttggcctgtttgtgtatgggagctccggaaatgggagctccttagctgctcccataagctgcgcttgaatctgctgacgcaacactgaagactccaccagcttacgcggtcccacaacgagcactgcgaagacacagaagaagaaaaccatcggccccaccgacagggcgactccaaatggaaccggaaagctctacgtagccgcaaccagaacgtaagtcagtgcgtaacctatcgaaaccccattgcaatggcgaccgctccacgattcgatatggttccttctactatcaccgctataatttgagctgccaagcccagcgctattgcgaaagcgtccacgaatattcgaatccaaagcatgtagttagcttgccagccttccattggtgagcgcagcggaatgcagtcggtcagcagagctgccaagatggcggggatcggcgtcaagacacaaaccgcaactgcgcgcgttaatgacgttctttggtggtattctcggaaggacagaaggcgctcaacggagtattggctccgacgtcctatctggttatcgtaccaagagttggtgagacggtggtagacgcgaacgaatgcgcttttcttcttctcttttggtcgctgaggggccagggatggatgaactttaacttggcggagggccatgggtcgtcacaatgaacgcggagggacaatcgtcaaatgttcggccgttggaggtgatctccgaggacggtcattatttttacttactgcggtctcctgccacgaacgcgctaagtatggagtatgcgccgtctcagttctgttagataaggaagttcttcgcgcagggttgcatgttcggtgcaatagaaaaccttatcagcccaacatttcttgcacaacactatggcgtggcaagactggcactgatacatgtactgtacactggagcggccacggggcatgacgatctggtcttacatcatgtacaaggtaccaagaatgagcacaagttattgtctgcaatgcaagtacagcggcttctggtcctcgtaaaaccgcttcaataaccagagcgcagacgacctccggcagagccgatcagcctcattcagcgaggaatcggcacaatgactcactgtacagtaggaaggctggagtgcaacccggctttgcgttagcgcacgcgatcaaagatgagtcgagcgtatcgcacttctctcgatacagtctatttcaggatacaccaacatgtaattgctgttgctacagaactgcggcgcgcctacttcgtaattactgcgtgactcaagatacgttcgtttgtgtacatgtaccgtagtctacctgtttctagtcatttgttagggcgatggtcagtatcctgtccttgtgtgccatcatcctgtgcactcaatacctcgagctcaaagagtccgtagaaatgatcgccaagtctgtggtgatactgagagacactcaatgaattaaaagtattattgtggatttcacgcattttggtgtggactacactgactaccgtaattagtctcactcagactattttgtgtgaggtccttgatatcttgctcacacaaattagactgagtgtggctacatacgaagctagactaatttaggtataaaacaaatagtcacactcagactaattatgacatcacctaaaatagtatcactgaagacctcaagacaagtcaagatatctctgcagactggagtaattgacaaaaacggcgttgtacattctttgagttaagcgatgaaggagccattgactaaatgatatcgacaaattcgattgtatcgcacgaggggacccaaaaaaacaaccccttattttctagataagcgagtagaagcaacaatatcataaaaaatctgaaaagaagaaaatttgtattgtagaagttgttaacccctctaaccccgtattctgtatcctacagaataagcattgccacaggacataatatccagcaaacttgtcctctctttcgaacttcgcatatggatgtttgtatagccggtattgtgcacatcttcctgttagattagcgatggaaagataaatgggatttattccgcggtaatagacggacgagtataaaccaccaacaggtttgaaaattcgggtggaagcctaaaaccgctgcgtgtcagccactcgtactttccttcattccgaaactgcgctgttcaagacgtcgcaatgcaagctttgttggggcccgtcgagcgcgcccaagtggccaaggaccatgaccgaagacgatcatgatgagcgccattgtgatctacaggtaagcgagagcgtgtactttgctctgtaacattgtactagtggtatattgattctacgttgcgatgttgattaccagacctacgaagccggctacagccgggtctactgctatattgtagctgatgcagtggctactcaagaggctacagaagaagcgttctcatggtgtggctacaccgcagactacagaagaagcgtagatgctacgacggatgcaacagaagaagctctccgcgtgatgaggttacaccggagattacagaagaagggacagaggctacgacgatgaaagcggcaggaatggagcggcagtgccggaggctacagagcaaagcggaggctgccaaaatggcgaagatgacccacggctggcgcgaacattgaagagcgtgcgcatgtaaaggaagaagtagacgttggcatgaatatcatatattgtcctgtttcgtacaagaggaaccgtgtgtagtgcgtgtcattacgggctattgagcatgcaagctccctggtgttgttagagagacaatcgtaacaagcttgttaggtgggctaaagaaatctaatgatgcgctaatgtcaagcacaaggaagaattcgccccgttcctcctcactacgtcagttaggaacagggcgatttcttcctccgagtttatcgcgatgtgccgaagatgggtggctggagccgaagtatgctgccttagcagccttgcaaggtattaccttgtagcaggttttgagcgtgctctacgctcgccacgacctatagaagctcgccatttcggcatatggtggatacattgagcatgttttgttcactttcgtagctgttctgtgcacaatgtacccagcgcttgaccgcaagatgcgaaagggcttccaacagcaaatctttgacaggttttgaagtatactttaatcaagtctaatgcttattctgtaggatacagaataatatctacctacgcatcacctgtacggggtagatgcatctatcttgacggcgtgtgatcaaggtaccaaatgaaaagtgcaaatcaagtattctcaccgaatccttcaacttgacatttccaaagctgtgacccatgatcagcttcgttggtaacaccaggccgattttgctcgatggcttgcctcctctgatgagctattgcggcaacaataggagatgccgaaatcacacaggcagctaaagtcctggtctggtccttggactcgcacgtagggcacatgatgtgctgtccgaagccttcggctccaaacaggcttgccacaaaatgggtgcatatgcacggagcatgatgggcaaacatgcacaggaccaacgtcacctccgcagccgccacaaggtgccaatgtacttcgtaacgtactcattgtaggcgtgtgctgcctgtagaacttgtgtcgaagtgcagtcgttgcaagagcagcggatgcaacctatttgagcgagatactatttttgaattgagactatttttgaactgcttcaacttttgctcaccataattagtctcatgaaaacgtagtgtgacaaattttgaacatcgactaattttgcactcagactaattacggtatccagtgtagccatttcgtgacggtttataccagagcccaacacgaataatcagggagcgaataacagtttgaacaggtttcgcgagttgaaagacgagtagagatatagcaagcgatttgtcgagctcttttaacgaatggcggctgcagcccccgccatttgttacggtatttcaagccactaaatcatctctgtgctggcgtgcaatcacgaaatcgagcgaccttcgttggtctgttacccttgttcgtgcctatgacgtagaaattgtcaacgcggacagtgttctaggcgtgtcggcgtgctcggtgcagatatggcatggttggtttcaaagtaaagaaagcgctgaaggagttggagaaagcagcgaacagcaagatggccgtgtgtcaattttgttgggcaatatgctgagtcccacccgtgtttgtacatctacgagctgcgcagtgcgcttaaaggtcgatttgctacattacgaaacgcttccgtggctttgacctctgcttactcggaaaattctagtaagcatgcaagggaggctgctcctgccgagattgcggtctattacaataagtgctacctttttactgtggccctaacacgacttgcagtagctctgtggatcggagtagacgtttttaccctattgtcatgcaggaatatgggagtccgtttgctttggcgcctaagccccatagccactcatgcccacaccggggctgtagacaccaggaccgtagacgccgggagcatagacgcctggcccgtcctccgataagcgcttgtactcgtgttggcgcgcgtttaccgtcgatttgacatagatagcgtcgtcggcaggcgatatcacagcggtgtgaaacgcttcagcctctccttcaggacactgtagccctcacacaccgatagaagctttatgtacaatcctgcagtctgtcagtggttcgtcgaccttgatcgtcacgacagcgtctcagagcgcaggtagcgtgggtagttcgaccatcattgtcgtccgtgggcaggtgcctgtggtgctgaccagtggacggcaaggcgaaatgcatagtttttgcacatcaacttctttatttagtcaagacaatttatgggacgaatagagcgtatgctgtataatatcatttaaaatgatatatatttgttaataaagaaatattgtgctttgcagttattttgccgaccattttagacgctaaatatggcaaagcgtgctcctaaatatgtgtgaaagaagatacacgacctgctaaaactatgcatatatccacctcctcatatatatatcgacttgggagggcctgcaagcagccatgtattggcccagcacatccaccctcttatgcataattgccgtgtgtgtaggtgcttgtggataaaaaccgacagaattgcagctgcacagccacaaaagcacttttaaaagtgcaattgtggcgcttttagcgtaattctaggcctccacccatttatgcacctcgatttatcgtaaatctagcaggtggtcgctataaatacagcaaatctcgcctcattgccaaaatcattgcaaagcacaatattagtactaatgcatttgatatttagcataatactactactgaataatacgatacttgaaggtggatgatgcaggccatgattatagtcatggaaatttacaagattccgtacaagattaatcatggatggtcaaatcgtatttagacggataatcatgtggagaagatttgagaagatacgaggaaccctcgtcgaggacgagaaaggtacaaacgtgtggttgtaatttgatccatgattaatccaggattgatccctgattagtcatggttgtgcactcgggggtcgacatacacacgagtagacagtctggcggaaccccacgcaagtaacgaagcactttcgctgtgaggtcgtgcaggcggatcgtcaacatcaacagcactttgtacagtcacagggggctgtgaaagaagcaagatgcaacgtgtattattggatgcattagcagccaccttccactaaaccttggcaactttctgcgcgacctaagtggctggaactttgtcttcctcatcgtcggcggtggctgatcacggaggcatcttctcttcttggtcatcgtgttgcctgtccaaggctcgggtaggcatgcgtttgcccgtgagcaaataataaaacaactcgtaacgacgtctcggtagagtgttggcgctcatatcctggggtggtcctccagcgacgagccggagaaacatccagcacacgtacacgccgcagctgaaggcatcaaactggatggggttgttctgttgaatgaggtcgtactgttggagcccggaaacctttaggtttgaggcgatagcgtttgcagcgtttaggtagggagcttggttaagtgggtcgtagtagaaaaggcgcctcgccctcactttcaccacgacacaacaccagtgagcgttgtgaaagttcagcgggatcaggacggtctccacgccattctccaccacttgctggaacacacggtcacgaattacctggtcgacacaccctccatccgatcgtctggttcgtttcttcatggtcaccgctccgcaaatctgcaagatgggtaatcggcttccaacatcaaacacagagccctaatcgatgcgtccgtcagtcagtttggtggtgtggctctgtagagcattgagtacacgaagtccggcatgttagggagacctgggattaccttgtgagggtaagtatccagcacttccgctgcgatcttgttagccatggtcgtcgtattctgcaggaagtgcaggaatggcttcacaagtcagccatttgtgcatatccagaacctgatctaccacctccttctagttttgaactcgggcaaacgtttcgatctgcttacgcgaaaagttacccacatccttgataatcacggtcttcttcatatctgacgtcgttacctttcgagcagctgtagagtcttgagacgtttcgatttcaatagcgctcgttgccgtatttgataccggtagtactttcacgcacgcggccagcaacttgtgcgggaggatgtagaagggatccatgatcgtgataggattcttcatcatacgaaacttggttttgttgttgtcagcttctttatacttcacgataactccagcgagacgccgctgcgtgtccagtatgcaggttgctcccggtcaagagcatccacaaggcggcttaacgtaacctcaccagcttgttttctccctctctgagcttggtcgtaccattttcggtccgtccgtccgccggccactgtcacctttttcagcttgcggggggcccctaccttcctcgtctccaggttgagtttgatacgaatacgagaccctttcgcagtctcaaggtctgcctcctcagtagcagcatcgctgtcacttgaactcgaactcaaggcaaactctcgtttcaattctggatccaaaccgccggtctttgattcatcagctccacggtccgtcttagccatcttccgctgccgaacattccgccactggtccatcacaaattgcagcatctcgtcaaactcgacgtcgtcgtcgatatcggccatttcagtgctgattaagcgcgtgactcgaactgcttctctgaagcgctgcgcttgagtccgcttttcagagccgcgaacggttctattaccgagcgggaaggtctcgtatgagaactgcctcacacgcacaagctctcatctcgtatttatccacctacacatcagcatgcaacgcatgggtcagaacgctgttataatcccggaagtccatgagtataatcctggatgtccatgattgtaatcatggaaaaacatgggctgatcgaaatgcgatgcaagaagacgacgcaactcgagtcgatacgcatccacggaatgacggggccaaggattcgctctttcttcctgtacgcaatagcgcgtcgacactgaagcttcatggtgacaccgatttcgcagtcgcactagacgcaggtgatgagtcttggaggacccctgaacaataactgcaccttgagctatgctgtccggagcgaacttgtaatacccaacgttcgccagtcctctcgtatactggtcagcgatctgctcggcgacgaaatgcgaggtgaaacgaagcacgattgacatctcttcatcatagttggtgttcacaagccggccgattcgttcgagccgatatcgatactcgttctccacccggcgatcaaacgcaacaatacccctgacacatgccgccatgctcatggatccgtccacgcaatctttaagtttcccaaaaaaaaactctccaaccgattgtcagtctggttcttggagtggggaagcgttgcgcggcgatacatcacccagcgatctttacatgaatcccaatttttctcgatatactcgaagaactcactcagtccgactcgatcacaaataccctccaaagaatcgtgcgcaattttgtatttctcttcgcagtctgcgtatatcattgcgtggatagctgcatccacctgactggcgttgtcagaagacaccttaccatattcagacttcgacctcttctccttcaagtacttaaccacgtgaaagtgacaaatcagaactcgagccttagggaaatttgcctcaagcactttgatctcgttcaagtccttgtcgacgacaatgactgtagtgggcctaccttggctcactactacggcttacacgtgtgcgcacgtgtacgaggaagcgtaggtttcttttacttaaattaagtatactcgagatccacaagtatactttaaacaagataaagacgccaagtagcgggttttggtaaacgatgagaactactatttttgtgtatgtttctgacttcctctaaatgcaatattctaaactaggaatctgccaacggctggttggcaggattctgctaacatgcaagtcactcattggctaagagatgctgctctcagccaataggaatcctaagtctcaatggaccacccgtcgtggtggtcgtaaatgtatgcagcctttggtgtgtctacaccaaggtcgagaaagtctttcgaacctctaacagatgtcgtatctgttagagttacaagtaactgtacgtgtaaccctgttacaccatcccccctcaaggttagacgtgccggtcccggcatgtcaaccaccattgatcgcttggtcaatgcgtgacgttgaagagcgcgcgctcgtaatgaaacgagcgcgtcgaagttgaagaccgctggcgcagcagtggagaacctctctgctgttgagtagcttgcacggcaacctgcgaagcgcgtcgctgccgcgggggcaggtacctatgtctgccctcgaagtgtcttcgggcgctgctgttaacagcagcgctcgcattacgttccagtatgtagcgcatggtgggcttcgtatgccctcaccaagtctggaacgtcttggagcaagacgttccgtggctcccatgtatcttggttgggaggaaatcctctccaacgagtacgaaaacgaactggttgcctgttcgttctcgggatactgtgatcaacaatccgctcaacaatccatcgagttgagccgtgtgcatcacgaatcggcggcggtggtggtggaaacacgccccgtgtgtggtcaacttggtgttgaccctgatctcgcgtctccccacgaccgagttccggtcgtggagtagttccagagcgctgggttcggcgctctgaagtatcctcaagttgcggcggcctcccagaccgcctcgatcgttccggccgagctggacaattaactcgacccgctgctccagcgcgacttcgagctggagaggatgacggcttccgccgagtcttctgcttcggttcatccgagctaggtagctcgtactgcaggtatggcttcagccgtccgacgtagaacgttggatggaggcgcatgctagatggaatatctagcgtgtaggcgttgccatgccgtgccaacacagtgaacggcccgatgaagcgcggagcgagcttgctcgccccgaagtcggaaacggcatgtttaggcaggttttgagttgctaacaaaaccaatgaacccttcttgaattcattagtgttgcccctaccaacattgtctgcgttcagcttcagtcggtcgacagaagctgcaatagcgtcttggacaaaccgaatgacggcttgtctgcgctgcacgaagttgattgcgtccgagctgaactcgttcagctcgtttctagcagtaggcccggcctctgcgttcgtcttcgcggtgtctgtgccctgcacagacccgttcttcttcttcttcttgctcttgtcggcgtctgtgccctgcacagacgcgtgcttcttcttcttcttgcgcgtagtcgcggctgacactgtgcaagtgtcagcggcattctgcggctgctgcgttgcagtcgtagatcctcccccatttaaggaaggagccaccatctcgagtagactcgggaggcgtgggtgcctgatggcattcacgtagaacggtgtatgcccggtcgaggcatgcactgagttgttgatggcgaactccgccatcggcagacactcgctccagtgttggaacgagtgagcgtagctcttaagcacgactacgagcacgcggttcacgcgctcggtctgcccgtccgtctgcggatggtccgcagtcgacatcgaaagttgactcccaagaagtgtaaacacttcttgccaaaggtgtgcagtgaagcgcgggtcccgatccgacacaatgtcgttcggcataccatggtgtttgaacaccatgtcaacgaacagacgcgccgtctgcttcgcagtcacttcagcgggaacagcagcaagatgtaccatcttgctgaagcggtcaacaaagaccacaacgcccgtgttcccctggctgtccggggaaagaccgaacacggagtccaaagacatggactgccaacactctcgtggagttggcagtgactgcaagggagcctgcgcgaaaggcgcaggcttcacacgttgacaaacctcgcaagcacggacgtacttgcgcacccatttatactaatgggcccagtagaagtctcgcgtgagaagaaggtatgtcttctcacggcccggatgccccgcagtcggtgcatcgtgatactcgtacatgatcctgagtcgcaggtcatggtcattgggcacgacaacgcggtccgcgttgtcgtcgactgcacggtagagtaataacccgtcgtgcacccggtaacggtgtgcacgagcacgaagatgcttcggcagcttctgacgagctttgtcagaaggtgctgagccgtaggccagcaagagcttcgcgtccgcgtcgtgcgcgaacgcgaccttcacgtcgtccatcagtgacgacgttggggtgctcgatcgcatggcgtcaatgacattgacgtcggcatcagtcgtgacgtagtcaggtcgacgcgagagcgcgtcggccaccacattgagtcttccgggtttgtactcaacccggaagttatactctgcgaagaatgagagccatctcgccatccgttgcgaaatgtgcggcgacttcacagccgtccgcaacgacgcgtggtccgtatagaccacgaacggtttgcttccgagtaggtacactcggaacttcgcgagtgcgtacttcatggcaaggagctccttgtcatgtaccgggtagttgcgctcagctggcttcagctgacgcaattggtagtagacgacacgatcacgaccctcgtgatcgggctgcatcaacgcacatccgattgcgaagtcggatgcgtcacacacaacgtggaatgggcgatcttggtcggccaccgccaagattggcgcctcagtcaagccccgcttgactgcatcgaaggcctgctgacactcagcagcccaaacccactcggcgtccttcttcaggagctgtgaccgcgggcgtatcatgcccgcgtagtccttcacgtacttgcacaagtacgtggccacgccaaggaactgccgcagttccttgacgttcgacggcgtcggccactcattgatcactctgaccttctcagggtcagggcggacaccgttcttcccaacgagacacccgagcatgggtatctcgctcgtcccgaagatgcacttcttcaggttcgcatagagcttgtgcttgcgcatgagcgcaagcagcttccggagatgcaccttgtgcattcatcccgtccgcagcccggctgtggacgaacacatcgtcgaagtagctcggtgcgaagtcgcgcaccgagcgcaacaagtgcgtcacgcacctgttgaaggtcgcaggggcgttcttcagaccctgcggcatcactagccactcccagagcatgccgctcggcgtgctcacagccgtgagagggatatcgctctcacgcatgaggatctgatagaatccatcgcgcagatcaagagtactgtagatagtgctcctggccatcgaatcgatgatgacatcttttcgcggtatcggtgtctgcgccggtatcgtcgcatcgtccagcttgttgtacgcatgaacgatgcgccaaccgccctgtggcttcttgacacagaacgtcggagcactgtgcggggatttcgattcccgcacttgtccagctttgcgacgactttcgaagaagtcgtcgatcgctttgacctgttctcgcggcagtggccactgccgcgtgacacagtacttcgtgcccggcacgagatcaatctcgtgctggattcccttgtcctgcggaagctccgcaggaatctcttccggaagcacgtccgcgtacttccgtaagatctcgtagtagggattcgtcttcaacgagtcccagctctgctcttcaaagcgctccttcttcgtcttcgcactgagagtgtcctcgctcacagtggtggtctccatgaagaactgcctcagttcttcattctcgctcttcgttctctcggcgtccgagagaatgcatatttgctcgatgcgtccatcgtgcaagtcacgcgcgaagcgcttccagctcatgactggaagtgaagtcagctccgacgcttgcgtcggagggttagcgagagtcatctccctgtaccggaacccggcacaggtacgcgtcaagacgttcaacgtctcgacgtccggcttctcagcctccgtctgcccggcagacattccttgtagcgtctcgaccccaggccgagacttgcggagcgaccttcgcatgcaccgtcttcttgttttccggagcccggctccgcttggttcttgacctcatccaggcccagccgtggacgggtgttcttctttagtaccggcggcgggttcatcccgcgggcgagcgacttcaagcccggcttggtcacccggcgcttcgtcgtgcagcccggctgcacgacagcatgcaagtttttccggtgcggaacgtttgcaaccgtccccaccgcctgcagcgtcggctcccggagccgacacgccatctttacctcgacgcctgttattggcggagccctccattacggagggtgtgtcggctccccgagccgacgaatcaaattcacccaagccatcgactcccggagtcgacggcgtttcgtcaccttggctcttatgattggccaaaactaatccaatcaaattcgcgtcagcctcctcggctgaggcgtgtgactcgcctgcgtcatccgtgccccttgaagccggagacttttcctgattcgctgaaaagcgggtgtcgacctccgaggtcaacacatttccttcattagctgttggcggcaacgccgacgcttgctgctcttgcgcgcgttctttgtagtccgtccaacgacggactacctgagttcgtacgtcagcgcacgaacgcggagctgagaaccttcccatggatacggaggtgtccatggaaagctccactacgcctgcaactcacgttgcccacgctgactgtccccacctgtcggacccagagtgggaagctctccaacgactgtcaacagtcattggtgaggcggctgtagctacgatgctgcgtacgctaacgccgacagagcaacatggtgttgctctgggattcatcatgagggagcagcgagatgctgcttcgtctaccacggtgtcgtcggggacgacaccacgcgcgcaatcgctgaagctcagcgtgagcaattacgttggaagagagggcgagcctctcctccgttggcttgtcgaactcgacactgccattgcggctcgacgcatcgtcgacccgttgtcgaaggtcgcgttcgccatgtcatatgttggcggacgtgcaagaagttgggcgtatggacgccgactctcggatcctacgtgctttagcacgtacgagggtttcaaggaggagctcagacaagcgtttgagcccccgcaaaacgagttccggtccagggcggagttcctcgacctgcagcagggcaagcatgatgtccatgcttacgctcagagagcacggtacttggtctcgaatatcgtgaccaatccgatcgacgaggcgaccaaggtcgtcacgttcatgaaggggctgagagatgggcctgtgaagacctatctcttccgtgagtacccgaatactctcgaggctgcaattactcttgcaatgcaggaggagtttagcctgcggcaggctaagctgcatccacatgtgccgaggccacagccacgcccggtagtgaggacgggaggccaagaacccatggacctctcgagtgctgcaactgctggaccccagcagtcgcaaggaaacaatgtgcgatgctaccgatgcggtagaatcggtcactttgctcgggagtgcacggcccccgtgcaccagcagggtggctatcgcggcggtgccgggcaccgtcgcaaccaaacaaaaacgctggacgccagtaggcgcggggcgccctactggtaatgcagttccgcgtgtcgaccttggacacgcgacactgaggactgcagtccccagtgaggttcatcctcactgcaagaaccaagatgacaagcccggccttgtcatcctgaatgtgaactcgatgagagcaagcggctctctccgtgctttggtagattctggcgcgtcgaagaactttgttcgactgcgaagtctatcaagccttgacttcgacgatttaaagatacctcgaagtatattggaagtacgactggcaacgggtgccgtcgtgaagaccgagaagcgcatggtacgcgtgcgcttcacgtatgaagatcaagagtttgtcgagacctttatcgtcctggatctggacgataactttgacattgtattgggcatgccgtggcttgcacggcatgatccggtcatcgattgggagaagcgcactctcgtgcgcttcggtcgcgacagcggaacagtgagcgatggccctgttgccgctacgcacgcaccgacaggtgcgcgcgactccccactcgagacagcgcctaatgccgctgtcccggagcgccctgggcgcgcgcgagcacgcgcgcaagagcagctagcgtcggtgttgccgccaacagctaatgaaggaaatgtgttgacctcggaggtcgacacccgcttttcagcgaatcaggaaaagtctccggcttcaaggggcacggatgacgcaggcgagtcacacgcctcagccgaggaggctgacgcgaatttgattggattagttttggccaatcataagagccaaggtgacgaaacgccgtcgactccgggagtcgatggcttgggtgaatttgattcgtcggctcggggagccgacacaccctccgtaatggagggctccgccaataacaggcgtcgaggtaaagatggcgtgtcggctccgggagccgacgctgcaggcggtggggacggttgcaaacgttccgcaccggaaaaacttgcatgctgtcgtgcagccgggctgcacgacgaagcgccgggtgaccaagccgggcttgaagtcgctcgcccgcgggatgaacccgccgccggtactaaagaagaacacccgtccacggctgggcctggatgaggtcaagaaccaagcggagccgggctccggaaaacaagaagacggtgcatgcgaaggtcgctccgcaagtctcggcctggggccgagacgctacaaggaatgtctgccgggcagacggaggctgagaagccggacgtcgagacgttgaacgtcttgacgcgtacctgtgccgggttccggtacagggagatgactctcgctaaccctccgacgcaagcgtcggagctgacttcacttccagtcatgagctggaagcgcttcgcgcgtgacttgcacgatggacgcatcgagcaaatatgcattctctcggacgccgagagaacgaagagcgagaatgaagaactgaggcagttcttcatggagaccaccactgagagcgaggacactctcagtgcgaagacgaagaaggagcgctttgaagagcagagctgggactcgttgaagacgaatccctactacgagatcttacggaagtacgcggacgtgcttccggaggagattcctgcggagcttccgcaggacaagggaatccagcacgagattgatctcgtgccgggcacgaagtactgtgtcacgcggcagtggccactgccgcgagaacaggtcaaagcgatcgacgacttcttcgaaagtcgtcgcaaagctggacaagtgcgggaatcgaaatccccgcacagtgctccgacgttctgtgtcaagaagccacagggcggttggcgcatcgttcatgcgtacaacaagctggacgatgcgacgataccggcgcagacaccgataccgcgaaaagatgtcatcatcgattcgatggccaggagcactatctacagtactcttgatctgcgcgatggattctatcagatcctcatgcgtgagagcgatatccctctcacggctgtgagcacgccgagcggcatgctctgggagtggctagtgatgccgcagggtctgaagaacgcccctgcgaccttcaacaggtgcgtgacgcacttgttgcgctcggtgcgcgacttcgcaccgagctacttcgacgatgtgttcgtccacagccgggctgcggacgggatgaatgcacaaggtgcatctccggaagctgcttgcgctcatgcgcaagcacaagctctatgcgaacctgaagaagtgcatcttcgggacgagcgagatacccatgctcgggtgtctcgttgggaagaacggtgtccgccctgaccctgagaaggtcagagtgatcaatgagtggccgacgccgtcgaacgtcaaggaactgcggcagttccttggcgtggccacgtacttgtgcaagtacgtgaaggactacgcgggcatgatacgcccgcggtcacagctcctgaagaaggacgccgagtgggtttgggctgctgagtgtcagcaggccttcgatgcagtcaagcggggcttgactgaggcgccaatcttggcggtggccgaccaagatcgcccattccacgttgtgtgtgacgcatccgacttcgcaatcggatgtgcgttgatgcagcccgatcacgagggtcgtgatcgtgtcgtctactaccaattgcgtcagctgaagccagctgagcgcaactacccggtacatgacaaggagctccttgccatgaagtacgcactcgcgaagttccgagtgtacctactcggaagcaaaccgttcgtggtctatacggaccacgcgtcgttgcggacggctgtgaagtcgccgcacatttcgcaacggatggcgagatggctctcattcttcgcagagtataacttccgggttgagtacaaacccggaagactcaatgtggtggccgacgcgctctcgcgtcgacctgactacgtcacgactgatgccgacgtcaatgtcattgacgccatgcgatcgagcaccccaacgtcgtcactgatggacgacgtgaaggtcgcgttcgcgcacgacgcggacgcgaagctcttgctggcctacggctcagcaccttctgacaaagctcgtcagaagctgccgaagcatcttcgtgctcgtgcacaccgttaccgggtgcacgacgggttattactctaccgtgcagtcgacgacaacgcggaccgcgttgtcgtgcccaatgaccatgacctgcgactcaggatcatgtacgagtatcacgatgcaccgactgcggggcatccgggccgtgagaagacataccttcttctcacgcgagacttctactgggcccattagtataaatgggtgcgcaagtacgtccgtgcttgcgaggtttgtcaacgtgtgaagcctgcgcctttcgcgcaggctcccttgcagtcactgccaactccacgagagtgttggcagtccatgtctttggactccgtgttcggtctttccccggacagccaggggaacacgggcgttgtggtctttgttgaccgcttcagcaagatggtacatcttgctgctgttcccgctgaagtgactgcgaagcagacggcgcgtctgttcgttgacatggtgttcaaacaccatggtatgccgaacgacattgtgtcggatcgggacccgcgcttcactgcacacctttggcaagaagtgtttacacttcttgggagtcaactttcgatgtcgactgcggaccatccgcagacggacgggcagaccgagcgcgtgaaccgcgtgctcgtagtcgtgcttaagagctacgctcactcgttccaacactggagcgagtgtctgccgatggcggagttcgccatcaacaactcagtgcatgcctcgaccgggcatacaccgttctacgtgaatgccatcaggcacccacgcctcccgagtctactcgagatggtggctccttccttaaatgggggaggatctacgactgcaacgcagcagccgcagaatgccgctgacacttgcacagtgtcagccgcgactacgcgcaagaagaagaagaagcacgcgtctgtgcagggcacagacgccgacaagagcaagaagaagaagaagaacgggtctgtgcagggcacagacaccgcgaagacgaacgcagaggccgggcctactgctagaaacgagctgaacgagttcagctcggacgcaatcaacttcgtgcagcgcagacaagccgtcattcggtttgtccaagacgctattgcagcttctgtcgaccgactgaagctgaacgcagacaatgttggtaggggcaacactaatgaattcaagaagggttcattggttttgttagcaactcaaaacctgcctaaacatgccgtttccgacttcggggcgagcaagctcgctccgcgcttcatcgggccgttcactgtgttggcacggcatggcaacgcctacacgctagatattccatctagcatgcgcctccatccaacgttctacgtcggacggctgaagccatacctgcagtacgagctacctagctcggctggcccgaagcggaagccccagcgggagcgaacctctgccccagcgcgtgaacgcgctgggccaagcgcacgacgcgacctcccacgtcgacagagatgtccgacgcggtctgcgaggcctgagcaacttgagctatcaggtcgccatcctctgcttcagagcggcgaactcacggctctgaagctgcaccacagcagcgacccgctcctcgagcgtcgggccaaggtcaaccccaggttgacgatacccggagcgtgttcccaccaccgccgcctccgatccgcgacgcccgcggctcaacacgctggattgttgagcgtattgtgagtgtattgtgaaccatagtatcccgaaaacgaaccggcagccggtttgttatcgtattcgttggagagggtttccgccccaccaagatacatgggagtcgcgggacgtcctgctgcaggacgttccggaaatggtgagggcgtacgaagctcaccacgcactgccgacgcgaaggtagtgcgagcgctgtggtcacctacagcgcccgaggccccacgatcgtcgcgttcctcacgtgccaagaacttggcacggagatccttgagactctcaggtacacgaatcgtcgtgtacccgtttaggtcgcggtcgctcaagcgcgccgcacccggaagacacaacgtgcactgttggccttcgggcacagcgcatggaataccagcgtccacagaagatctgtggagctgctccaacctcccgcgcgtcgagaatgtctcgaagcgttcacgggcgtgcttaacccgctcacggtaagcagccggcttcttgttgaagttctcaacaaaagcattccaactttgacaaagtgcctgccactcaggcactttgctgcgagaagaggtcttcttgctggagaagtaccggagctcgtggaagagcccgatgtagtagtcgcgcctttgattcgttaacggatcaaagtgctgctcctccgccacagcatcttcgtggatcccgctgcatacgtacagcggaatttcatttggaggcatggtgttgcccacacggtctgcgatctctgacgcagacggcatccacggatcgcgcgctgcctgagcagcgcgcggagaacttgaagacgccacctcactcggggagcttaaggccccagcagcggagagcggagtttcgctcttgccgcgcgaatgcttcgagcttgaagcgtccgaatcgtctccttcacgagggcgtctcgacccggcatgcgggtcgagactatcactgtcgatagactccttgcgcttgtcggaagaggcctcgccctcttccatctcttcgtcgtcactcccgtagtcaacggcgtcgttgactacagaggaaccttcgaggacaatctccggttgagttgtccccgccgcagccttgtcagcaagcgcgtcacgctttgctttgtggcgctcgaggtactcggggatagagagagtctctatcgcggcggaggtgttcccctctgcttcagcggcggtcttcttctgcggcgagctcattgcggaatgagctcgagtttctttctcccaacgtgaagaattgacgaatggtcaatttcctgattgacgtgccgtgactcggcgcgtctaaccttgacggggggatggtgtaacagggttacacgcacaagtgactacagtcacttgtaaatctaacagacacgacgtctgttagaggttcgaaagactttctcgactttggtgtagacacaccaaaggctacatacatttacgatcaccacgacgggtggtccatagagacttaggattcctattggctgagagcagcatctcttagccaatgagcgacatgcatagcattggaattctgccaaccagccgttgacagatttctatcttagaatattacgtttagaggaagtcagaaacataaaacaaaatagcagttctcattttaacccaaaaacattatttggatcgcttatttagattaatctatactcggaggcccgagtataattaactctaatttaaagtaagctacgcttcctcacatacacgcacacacgtgtaagctaaagtagtgagccaaggtaggcacattacagttcgagcctcacaacctactcatgtatcactactcattgagtaagtcagtaagtgtgtgaggtatgtgtgtggatagattttgattaattgctatatcttttgcattacaacgagtagtgagtcagcactgggcaagtgcattgtagtgtgtatgacgtgcatatttgacacttcgttttggttataagtttctttttgtgaatgctaagaatacgtgtgtgtatgatgcgtgtgcacacattcacactaaccgtcgtatcgtttgcatttcagcgatttttagcttaggcttgagcaagtaggtgtacgtgagtataaggttgcatgctgggtacttggttttgcttaaaaatatatagcgtgttaagtttaaatatttaaagggtttagttatgtgtgattgagacttccagagtactacatacacacgttaaatcgaacgccaattatttaagctctaatcagcccagtggttgaaccgctgagtgcatgtgtgagttcgagtctcaccacggttgaaattttagacttggttattgtatgcagcttttgcccgggaggcggggaagccacacaacttggaccaaaactaaaaccaccgccgcgtagcggcggcgctcggctagtgtgtacagtagacgaggaagaccaagtggcgttcacttcgtaggagtcaagtgcgtataaaatgtcaagcacagacaggaggcgccagcttacttaggtattgtacaagaagggtgtcgtgtgcaacttggggagtacttttctgaagtacaactttgcaacccaatcggtagggtcaagggcaggatggcgcacagatattgatgttgacagtgctgacacagaccagtagctgtggcaacaccaacgccgccaccataataatattttttaaaattggtacatttaaaaatgtaccggtaagcaaccgggtcctggagacacaattttaataaaaaaaattgtgacatgctaggtatcgtagcatgatgctactgtatactgtacatgtacggtacatgtacctacgcacatcgagattactggagattcatgtacagatgtattgcgctgctggccaccactgaagcattttcagcctgaaaatccttcagtggtgggccagcagcgcacctgaaattcaggtgggtacagcaataccaggtgaccgaaccgtacattccccagccaaaaggatgatcatcttcctgtctgcgcccaaggcgcgatgatggttaagcgtcccgaatcggatccttaatcggacgctctgctatggttctccccgatagctccccaccacttgtctcattcttcaatctcccccctggtgcacggttcgccacttcgaactcggctctaaaccatcgggccatgaacttccgcgccgtcctcatcgctgtcgtggcgtctttcgccgctgcccaagccggcaacgtgatcccttacgacgaggtgcacccattcgcgcagcctgcgcccgtcacggaccttcacaagaccatgctcaagtacaagccccacctgaaaatcaaggaggggtgccacccgtaccctgccgtccagaagaacggagacatcagcggcggcctcgagtggagcagccccacggacaatgccgagtgtaagggctcccctctgggctcgcaggtctacgcgcgttcgtcgtgggtcaagggcaaattcgccatcatgtacgcctggtacttcccgatgggtcgtgctccgctccttcccttcggccaccgcaatggttgggagtacgccatcgtgtggctggacagcgtgtcgtccacgaactcgactattctggggacgtctctgtcggctgctgtgggctgggcgaaggaggtgcctcgcaacaggaagtacctggacggaaacaacctcaaggtcgcgtactacttcaaccgcgacgtgcgctgcacggccgtcgagtacacggaggaaatcggcgagttccaggacgtcatcacttgggaccagctgccggcaccgactcgcgattcgctcagtaacacggactgggaccacacgccgtttaacgtggcgctgctgaagatgcccatgaaggacggcgtcttccaggagaagctgaacagtgcctatccgttctagatacatgtactacggtaacttcacgtctaaaatccacacctgaaatttatacaacaagagtttgttaggttgtttttacagacctcgccctcacttccggcacccgatgctattatagggtaaattggtgtggtacacatgtatgacatttggtatgctcagctttaactaccttcaagaccttcccaagatggtacgcaacgttttgaggaccccgatctgtcgaatacgcgtgggtatcgcatgcgagtcttcgcgcccttcccgcttccacttacagatgagagcgtctctttcatcaatgaaattgcccggagcaggccagcaacgcacgactattctaagtcgcggcttcgaatgccatggcggtgcagacctaaggcaacatctaaaagtgtagaagctagcagcggtctgagccaagcagcagtgataattgttggcaagctgaagcagaatcacgcaagtccggcagctactctggtgttcaaagtcaaacacaccaccgtgaggaaaggatcggccgcaaggagactcctcacgttaatgcacggagacacgggcattgcctcgaaaagtttgcgctcagctttggtttacgattcggcgaaagaggcggtttgggacgctcttacgagactctcagtcccatggagcacattggaatcctgcccgtcgaccgcatcgaggagcaggagagcttcagtaacacagctacaagtagattgatcataaaacaggagcgacttgcttggtgtgggtcaaattgggatgtgtttattacttcaagtgttgttgcaggggaaagctccgcaagcagtaaaaccccgtggactcttcctgactacattggcctcagccaatcacaacaactgcacgcatgcaggagtcattctcagaaaccctcgggtcccttcgagtagccatggtcctcaaccaccacttcattactctgtcacagccaacacacagctgctgcagactaagctatcctcgaaatcacactcgatttctcgtactcccacttaacttaggatgcacaacacgtacttggtcaaaccacatttgccaaagtactcgccatcccaagcgcacacgctccaggacaaaaataaaaaacttaccaccgtagcctcagctaggatttcatcaaacacaccaaacataccagcacgcagccgatatcaccatcaaaccgctggtcgctagcacgcagccaacccaacagcgtccattcaacaccatcagcccgcagctggcttcctccgtttcggacaactcgagccggaaactcgaagcaacaccattcaccttgtcgctctgatcgcaccacagctacccccaattcacaaggtatttgcatccgcaagcacgacacatcgaccgtattcattcggaggtaacgtgacgtccaagttgtccgacgcatctgccaaccaaacttgtgccaaccgctcacaactatgaacaatagcctcggccatcgcacacgaccgcagccgtctagatgttctttgcacctagtcgctcatcaattcacactcggtgagtcgagtatagaatgcgactgtttctcactccatccaatccgtgctcataaaccaaagtttatcgccaactcggaacacattggcattgtctgcctctgcagcacaccacattttgccctggcatatctgattggagtcctcgcgctcggtagcaccatcaagtaacgtgtaaccgccctcgggtactaccttgatctagaacgcatctagtttaccatcacaccgatcctttgccatacgccacggattgctcatccactgcattagactgtcgtgaagtcgtacaccgctcggatattaacttcattcgctcgacagcactcccacttagacatacatctcctcgtgccgcactctcggtgcgctacacaaagctctgccttccattcgaaccagctcggggaccaatctgactgaatagactcaatcttaaaccgcgtcaagcgcttcctggaattctccgcattactctcacttccaacctgcacgctcttgttgagcacagtcagcactcccactggactactccatccactctctcagtgcaacttgatggacgaatgcaaagcaactcgagctttgcgcacaattcctttcgcaacctgtattgagactgcctgcagcgatccgtcaccctactttacgcaaaagataatgaatccgcaattcaaatcggatccaagcttctcatgccggcacaacattgctgctcaaccagtgtcactactcatagcgaacacactgtccttatttctcccactgagtccgcgaatagtacaactgaaccgtagccaacattaccatgtgccctcacgctcgcagcttccttcttacaacttgccacaaactctcccgccggattcagcaactccgttcttctctttgccttacggtattgtaggccaattgacttacaactagggtttccctcatgaacatcgctgacttccaaatctccattactcccactgaatcagagatctgttcatgtaccgaagtcagtacaactgcacgagggaaatccgtgggcgcaccacagactctgcagtcaaagtcatgccgaccaaaactgcaaaatatttgtcatcgtactgcgtcaatttatggcgaggagtaattattatctgttgctaatttactggttcatctgttgcgggcaaatcagcggaaaatctgttttcagtcgaagtcgctcacgattctggggacgtgccaaacgcggcacaatgatgacgaagttgcattgtagcaccaccactgccggggtatccgggcgtgggggatgcccctaaacttgatgcaatgcgggcttctgcagcatttgcgacgccatccgcgatgtcaactgcccacttatgcgcgtgtatcgttcgactgcgtcggacttccatctcccaaacagcttcactgccagactatcaaaaccagcaataaacagcgccgtagcgccgccacttcgaagggagtgcgaggcgtagtcttgcggattatggccagctcgaccagcagcagcctttatcgctcttaccacgtcggatacttgcaaattgtgagatgcatccaccttgcacagtaactcgcccgcatcaatacgaagcgcctcgtggtgacgaactaggtaccatgctgctagtacagggcaacaccaccgatgcccagatctcaccaattctcgagaagtacccttgccaaattggtcggatttactccctcgaaattgtagaatcaccgaagtcatatcatgaaggtttcgggtctcgtggcctctagcatccacaaagttgacgtccgctctccgaattgcgcagttgtgcatccttgaaccttgagccaaatattcggatcttctcaaaagaaagacgaagcccagcactgaagccccccaaatcacccggtgctgggtaactgcgaaatcgaggagctcatgcaggcacttgaggattgcgcttgtaacgggagattttggcttgcttgatgggtctttccgccgcattccggtgatagcgagttggtggccgggcaaaaagccgacattgtaaccaagggttcgcctatgatgccacgcaatatggctgactttagagagcacggtcgaggcagaattccccgatcccgattttccccagccatatttccagcagtacgtggcgaaagggtgagctggtacgaatgttgccggcggtcttctggcagccattttgcgaattgaagccgctcacaccatctacaccactgtgtccatgtgcttgcatacttgatcttggacgtcgtggccagtgactcggactgaagaggattcgagaagtcgatgtaaattttcctgcattcttgtggaacttgtgtctgcacccaacacgaagaaaaattagtccatcgagcaatgtaaggttcggtccaagctcgcgaagctgcatcagccatccaattggccgatcctggaatatgatccgccgatactcgaaggttgaaatacacttcagccagaccaatcgcccgatttatttcttggctgaacgcgttgttggagtgcatccgattgcaccaactcacagctgcggcattgtcactccaacacttgacatgagttgtgcgtccgttcgcttgtgcgctccactttgaaccccacgaccacaacgcgatggcaatgcacaagtgttccctgacgttgattgaaaactcgtcatggccgctaccaactttgtcgatgagcaatttctcttcgtcatcaaactggatctgtatatatgactcgcaggcgggatcaagcacggctagcccgaggttggacgcgtccatatacagctccacgtgcggtgccggcagctcgccaaacatcgcaagcggtaattcagcaaaacaaccatgcattaaaatgtgccgaaaccacacgagatctgttttggcccctgctgtaagtttaattctgccgaaccgtggtgctgatgtacacagtgtctgcaatcgttggtaaaaaggcttggctgttggcagacaattagccacgtggcgaagagaacccagtagcttgtacagttcggattttgacgctgtgccgcgttgctccaccgcactggcgcgagcacgagctttagcgatcttctcttctggtatcgatacggtgcggcgctcggtgttccatagtagacccagaacaacaatttccacactccattccgaaaaatttgcctcattgatcgaacggggtcctaagacagccaacatagcgtgtcgtaaagtagcttcagcgagttctaacctgttctggacatccggttcgaccaagacatagtcatctacccactcgtaaggaaaaaatgggttcgtgtcgctcgagtcggacactgctgcaggtgaacttctgcccattagccacgtgatggcacggccaaagagtgcgtagcaggggggcgaacctgaccagccaaatggtgccgccatatcgacgacgagaatgccgagttctttcacatatgccgccattctgaagacctggtttgcgcgtgttcttaagtggcgaaaggcactcttgacatctcccttgaggacgcgtatccggcctgcatgccctgcttttgctaaactcgtgcgataactaccactgactcgtatctcactttgggcaccgactcgacaataaatgcagcgtttacacagtcgtcttttgggtaggataaggcgtgaattgtgcgcacttcctttcatcgggtcgacatccttcttctcaacagcaccgagcggactgcagattagttctggccaccgctcaatgatatcagcatcaactatcaaatattgaccggagtcttggccatcccgaatgcttcttgtgacagcacgtaggtaacgtcggcaggaaccatggttcttcggtggtggccgccgcggtctcggcccttgtctccaccccacgtcgatgcccttctgagcaatttcaacgagtagatcgagatgttgatagccgttaagaacggtccgcagccggacacgatcgatggctttgttcggtctgctgtctacgctatcttcaccccgcacaaatcgcgtagcttcttcctgggacatattgtgcgtgcgaattacggtggatagagacttgcaggctacttcgtcaactgcgtagacaggagatgcgggtcgctttgcactaacgaacccccgtttgcggtgcaggacggaaattcgagcttcggcccgaagtaaatccgctttcaaacatgattgaatctctcgcgccgaatccaatgacagactaatgtgggcgtgactgcaacacctcaaccgacaaacgcttgcaccctccaccggcaactgctgcgacccaagtgattttgaacgcaagtcagctacccgggtgcaggataccttgccggtctcgctccttgcgtctgcctctgtgtcttaaaaaggcctcgattgacgactatctgtgcaaccagcagccattggcgctgtcggatttaccgcagatcccgccgactgcgcacaaattacctcgccaatcttgctcgttgttgtgggtaccctaattgagtcgcgtgggggcctcgattgcacgcgtaatctagactggtccaacaccgtctgagatccatcacttgaattgattgtgttaacgcagtttgctacttgacctcgcgccaccctatcggctttgcatggcaccgccgacggtcggtcgttttgcgttcgtgatggatacattgccagaccagtctgaacgagtcataactctttgtgctcgtccttcagcccaccaaagcgcctgtcaatctcttttttcacgatcgcgggtagctgcttgggaacgaaatgcccatgctcgctgggacaaccgccatcactgtccaccgcacaacccgccgctgagagaaaacgcatgcacagtcgtcgcgactttcctgatgcggggtggtaatttgcgaagtacttccttagggattcgcccaaatcgcttcttaccgtcgtggttgcggccgttgcggagctgggatccttgttcaacgtggccctcaaggcgtgctggtcccgacatcatctcgtgtcgtacatcctgcacttgccgatgcacctttatcaacatcacatccttgagcaaccggtcatcggtcatacaacgttgctgtacggctcgaagtgcaccaccttcctcagccgctgtacgaaaatcctcgagaacgtcatttacccagaaaactaagctagaaatctcttttggcgtccacgatacctgcgatagcgtgtgttcggcgaacttcacgatggtctcaaccaattcgatcagttcagcacagcaaaactcgcgagcataggtgagaaaaaccctggcagagtccacaacatcttcgatgcacgatggcggcgatgccgccgagaattcttgcagttgcggacaaattgtcaaagtttgaaccaccggcctccaaccaagccacccgctcatccctcgatagtcttgcaaagtgtcgaatcgaaagaccaccagaaccgagacgaatatcataggcccgcgtacaaattccaggtacggctttgaactccacgtgctcggaccgaactaaacctctgcaaaacacattggcagacttacctttgtgcttctccgttgttatgcgctcgtgaactaattcctgctcctcggacggtgcaaatgcgtacttagacgacttctttccccttgtcgtaggggatggcttctgtacgtgagtacgcatggtaccaccaccctccgccggctgcgctttgacgttggcctccttcctaatcatcacgaaacgctcgagaaggtccggttcgtcgcttatttttgcgataatcaatgcgtcttgatcaatagcggtttgaactcgttgtcgcttggagaggacgtggccatcgtcgccgttggcaaccgtgacctcttgctgtcgttttgtcacgtgttgtgtggtagtgttcgcccgaccaacttcagcaccgcgttccgattcgtcttggggcgagtcatcgtcgtctggaaacgggtcaaagagctcttccacgtcctgaaccgagccgcgagacaaagcggacgtgctccgaagcggttggggcgttggtggtttgcaaaatgagttgcctacgctgcgtggcactggtgacacccctccgtcgacgtaaaaagcgatatttatagcgtgctggagtggaaaatgagcttcctctcctgttcttgggtcgatccactgacacaccttgtcaccactagggtgattttcctcactcatcagaccttccagtatctcggacacttgatttgaagcagaactaccaccggtaccgagcagccgactcagaattgactgctccatcgcctctaggtcagtaggactccactcgtcgcttctgaactcgacgtcttcaagcaacagaacaatcactggtggcaccactgacactgcagctgccgctgccacaaattcatgaccaccggatcggatcgtgacactgctctggtcgaccgagatcacttgtccatactgaacctctccagctaaactgacggacacgggtcgtcggagcaacgagatctgaccggcctgggaaacttcgctggcccgatccacgtggtcttcggcgacggcacgatccagtttcccttcgcctccttccaagctgcgaaacgtcaccacctccgagtctagcagtaagaccttagcataaaacggatgctctgcttcgaactccaccacttcaggtgtcaggtgaaggaaggagcggcttgtaagtctcaccatgaccggagtgctgaaggctgaaagctaaagcaggagggcttaagcggcagacggagattctgaaactaacgctacgacctctacgacttctcctagcacttgggcgttggtttcatctctgctttctctcctcaaacgctattttcaccttgaacttgaaaatatccatgcccgagtcggtttatctgttgcgtggtgtaggggacgtaagcaacaggttttcagtacggaaatcctgcaacagattacatgtcgagttgactagtatatctgttgcctaggtgattacttgttgtgctcatgcatcgagtaacagcacccctgctattgctctgaaggtggtcgatgcttgataggattttttaaagggctcgcatgactttcgcgaaggctatgtgaaagtaggatggccatagcagtatatggatcacttgaaggtcattacactgtcctccagctccaaaagatgctacgctgcacattttccgcgtctggcgtcggctcctgtacagtcccgcatcacctcaacgtcttcaggcatcggatctattgcgccttgctctacatgggtgcaggcaacccctcttcgggcgcgaacttgtgatccgcctcggactagggcaagtttggattgcgctggaccttgatttagatagttgggctacgttcacctgtacacttgcttacctgtgcatatgactaaaaaaaattatagttgcgtggtctccaatagctcttcttcgctcgttgttatgtagccgccaaggcatttgccgcccctgtgcgagcttgtacacgtcgcgactacatagtactgaaggactcactgtctagtgcccacgctcttcccacgagggggtagctttgcactctactacctcaggaagcacccgggggggaacccaggcagctgttgtcgacgtggccgacggatgctcgtgataatgcattgttccgttaatgtcactctcagtggccacgtgacgtggccactgagagtgacccacgttcactacatcgtactacccagcggacgtgagtcgacacctccgtccgatgacttctcgcatacttaagtacgcgcgcgatcggggctaccacggacacaaaggctctcattactacaattggggctatggctagcgtcttgattcggtgttgcagtttggttgcgctccatgttgacggcctcatgtctttcttcattgacacccagtcgattcgtcttctcgtacaccgccgcgagctgaacgagttggcgatcctcttcatctgaaaagtcggccatttttcgcttcggatactgtctatacaaactcaagtgaaacgaccctttgggggttcatactgaaaccgagtttatttttttgggtttgtaagtcaacgttgggtcgctgtcgaccgagtcaatgtagactcgttcagagtcgacgttgacttcgctattactgaaactagtacgtttgagtcaatgtcgacttggttcaagtccatgttgacttcgcgatcaataaaacaagcgtattcgagtcaaagttgactcgctcgaagtcatcggtgacttggaaatgtgaattcattcatcgttacgcagcagcacacagactaaggattaatggttttctccaacacgcccaatgcttccataatctccgtgcatacatacgcgtatctgccgtggtccatcgagtggatgacggtccatgccttgtcgtggaccaactcatttcttttctcccagaactcgaccgcaagcgccttgaactcttcagcgtccgccgtcttcgatccaaacgcctccttcattttgcccagattgaagtcgcgcttcttctgcattgtgctcgtgttacctacattttttttcaatccagagacaatggaagtcaatacaatgtcaaaccacactgaagcagaaactcaagcggcttaccatttcggatctcggcgttccattctgtgaacgcttcgatagcttccttggtcaccgcgctatacttgtacgtatgcagatgcagctctcgtctcgcgatggtgtcttgcaatccgctgttctccgttttcaccgcctctagcgcagccttcatcgattccaactgcgttctcactccaccccgttctgcttgcatcgccgccctctcttcctcgatccggttgaggttggcttcgagctctttaaacacagcttggcacccgttgttcttgaactgctcttccaggagccgggtctggcgcttcatttcattcaaaatcttcgcctgcctcagcgatattaggcctccttgttgcttctctcgactcggcttctctcatttctttttatccgcatccaactgctcccgctcccgttgcaggcgatgcgttacgttctggagacgccggccctcctctttgagcttggcctcatgcgattgcagctcctcggctttgacttgtagttcttcctccttgttctccatattcttctctcgcgacctcgttctcccggtcctccagttttttcttgcgcgcgtccacctctctcgtgaggttgttcatgtcttcgtgcacattctggagtttcttagcatggctagcctgcgccttaagtagattgtctgcgtgcgtggcgacggattgcttcgacaaattcaactcagtttccacatgggcaagtttcttgcgcaagccacttgaaatcgccttctcctcggctagttgtaaaatcgaattccgcaactccttcctcaacgcgatagttatatcgttgtctgggagatcaaaattcctgagttcggtcagctcgttttcagcggctgctaactgcccctctaatttccttgaccgcgcttgctcctcccctagcttctctcggaactgctgcagtgcttgcgaaatagagagttcaaaattcgcatactcccctcgcaaagggtgggtttgcaggctccgagctggggcaccctcagggctaccgctcttacggccaaggccgttgttactgtgatgatggctatgggggtcgttatgaccgctctgatcgtaatgactcacacgatgactaggaggacaacgtgacgctcaccgcagtgatccttcacctcgtggatcgacccgtaagcgcgtggtctgctggtaaatccttggaaacactgaagaagctgtaactcatccctggcaccaattagtccagtagcacctcgtgcgctttattagaataggtcacacactcttcgggataggcgtggacgtcaagagcgcacccatggcgacgttgacttgccatacctgtcgtagcacgcctgcgtcagaagtcacaggcctcgttagcctctaaggggaacggcaagttatcatctacatgcagcagtaactcaagctgcttgaaaagttaaggaatgactagcgcagaataaatccgtatcagaccgctgagctcgccatagtccccgaaacggaataccacaagttcatgtatcaccttcctgagcaatagcgggggtgctcttactcgatacatgggcacaacaagtaatcacctaggcaacagatatacctagtcaactcgacgtgtaatctgttgcaggatttcggtactgaaaacctgttgttttcgtcccctacaccacgcaacagataaaccaactcgggcaacagattttccgctgatttgcccgcaacagatgaaccagtaaactagcaacagataaaaatattctccaatttctggctcttgcttacacaaatcatacaaccaatatctatttcgatgcatctggatgcatgacgtcccctccaacgtccaattgtgcaccaacctctggtcagccaacgccgccaactgccattcaagctcggcggcgtcctactcggtctacaccacgacgcttcttaccatgatctttccaccggtcacagtgccagcactcgaacgaatgtacaatctgatcaaacatcacttgcaacagcatacccacaagcgctcacgctttgggctcataacctatgagactctcagtcccatggagtacattggaatcctgcccgtcgaccgcatcgaggagcaggagagcttcagtaacacagctacaagtagattgatcataaaacaggagcgacttgcttggtgtgggtcaaattgggatgtgtttattacttcaagtgttgttgcaggggaaagctccgcaagcagtaaaaccccgtggactcttcctgactacattggcctcagccaatcacaacaactgcacgcatgcaggagtcattctcagaaaccctcgggtcccttcgagtagccatggtcctcaaccaccacttcattactcagtcacagccaacccacagctgctgcagactacgttatcctcgaaatcatactcgatttctcgcagcttttcgcgctctctttcaggcggaatacctactcttggccgagtacgtcgagtttgcactaccgattttctacgtggtctacctttttgtaacggggtacaatcaagtgtacccattacatgaagagtgacgggtgtcactctcccgagtacatggtacatggtaccagtagctccgcaagccaaccatttgagtttgtgtgggcttttgtatagttaacttgtagtttgtattacgaccaagttaacctctaccaaaatacagtcagtcttataacctactcctttgtagcaaaccgttccctttgaggccgggaactggtgaactgctgttcacctggatagtaatatccgcacgcacttcctctgtgcattgtgctgtgtgacccggtcacacttggtagcactcgtagtcaatcctacgcatacgcgggtagattggtctacctgaatcctcgatggctcaggtctgtgagccacgatggaccgaagtgagtttcctcacttgactgactcgcagttcgagtcggtgtggaagatggtgggcatcttcggaagagatgccctacggagcttggcggcagcgacgccagccgagcaggtcgagcgggtgagcgcgtttgacgagtacgaccgcgggcgcatcgctcatgtgcagggaaacccgctggctcagatgagtgagcccaaacgggtgcagcctaagcctctgcggctagctgtgcctccgttcgaagggaaggaaggtgagaaccttcacttctggatccgggagaccgaggtcgcaatgagcacaggtctcacctcggccgagaaccttcgagtcgccttcgcgctctccaatcttggcggacgtgccaagacttgggcgtatacgcgcgaagcgatgtcgcctggatgtttcacatcctgggctcaggtgtgtgagcagcttcgagccgcttttctcccggtgaacaacgagttccgccagcgctcgcgcttccttgcctgcaaacaaggggagcgcgagctgtacgcgtacatacaggagatacccacattgacaacctcgctggtggggaacccactgtcggaagacgtcaagatgacagtcttcgtggacggcctgaaggtcggttctgcgcgcacgcagttgttccgcgtgcgcaccgccactatggaagaggcgatccaagtcgccctccaggaagagtacagccacaagcatcctggtgctctggctgttgtacagcctgtggtcgctgacagcgaaccagaacccatggatctgagttcggctgagcagtactcagcccgctgctacggctgcggcggactaggacactatcaacgtgtctgcccatcgcctgggtctgggaagaagacctacccgaagaccagagggtcaaggggcgccgacgccatgaaccgtcaggtgctcaagagggacacaaccaccagtaaggacgagtgccttgctggggttggcccgagtctttgtgatgggtgtacggaacgcgtacaccacagagacccggggtcccttgcgagcactgacgcttgcattggtgaaggacaacgatgggttgtcggtagtacacgtgagtgtgcgggggtaatggtatccctagctatgattgagtctgggacatcgcgtggatgttcgcacgtcgccagatatgtcggttggaataacgacacaactgccaagactctgcgagagagtctaagcacaaggtcaggtctcattgactgaggctgggccgaagaagaaccttggggtccgctgtgaccctggctgccgcgttcgagggcgctgacagcaatggaaccgcacatggtcccggacatggaaccgtacatcgtcccggacatcgtgccgaagccggccctgggcatggaaccgtatatgccctcggcttgagcaagtatgacttggccctgagtgcgccgtgcaagctgcacaggctctcagtcgagtagcgcgacaacgccttgaggctaagtcgaccctctgtgtctgacagagcattggtgagtcatgttcccacctctggacagacacaagggcgtccgatgggaccgccagggcgctggatgcgtccgacaagacgaagaagaagaagggaggcatcattgacatgctgatctccatgaagaaggtgcagtgtatctgcaaccgagggctgttatgcctggcatgtggagctgcctcaacaggcaactccagtgctgagagtcattgctcggtatgaacattgacaagggtggtgttcgatgacaccaccaggtgggtaaccaaggaccactgactagcgggtaacttagttccgcacagagcatgaagttctgaggaggccgctcaaggcacctccggcgtgggtaatcaagtaccacggacggtcgcccaaaccttaactgaagaggaaggcgcttcaggcacttcctgtgtgggtaacccagttccacaccaggtcactcagacctaaactgatgaggaaggtgcacgatgcacttcctgtgtgggtaacatagttccacacgcgtcactcagacggtaacggattgtgaagccacatgatgcgcttcctgtgcgggtaacgtagttccacacgatgccgtaaggctccgcatgagccggaaggagtcgctcgaagcgacttcagcgtgggtaacttagttccacgcacggtcagtatgaccaagactagtgatcaggtcacttgggtctcctcgcgtgtggtggatgaccacacggagtttaagaggctcgtgacaccgtcacgatgtcatagccgcacggtcctcttgaaggcgccgcgcggctttgattttaagcgggggaggagtgcgcggaagcacttcctacctccaagggcttggcacccagtcatcatggatgacgttcgactgggtgtcgaccagcgcagctgtggccatgcgcacagaagacgtggcttgggtacacgacgtacctgcggcgatgcatgttgcgtcgccgccgactcggcgagcatggtcgatcacgactgaaacgtgtctgccggagggcgacatctcaatgaccacatgcaggagcatgctcggcctgaagaaagaccgctgcgcggcagggatcgttgtacggtctgtcgcgcctagcactgtgcggcgttgggacaacaagtgtccatgactcggtgccgagatggctgagtctgagtatgcgtgcatgccatgcagctactctgaatgcaggacaagccgtacgctgtcatgggtgtcattgccagaagacgtgggtaacagagtaacacgtcaagttacgcagactcaaactgcatataggctggtagatgccaagccctgatcgacgatgttgacccagagccaaagaagggtagctgcccgtgccaccagagtctgctggcacggtgactcggtgctgcagggcggcgcgaggttaggcggccgggtggcgcctgacccgccggggctcaaatcgtaagtgggggaggggatcggaagtgcccttcctcccgaggtctctggcatgagacttgcttcgtcgtagaggccagtgtagtggctgcatggtgtagccactcacgaagtattgcacgaaggtgctggacctgatgcatcgctgctcaggtcccatggtcatggtgatcgatggccagcaaccttggcagcggctactgtcgctgctgggccgaagatggcgcgcgcattcgctgctggaaggctgcctccgtcaggcaaagacatggctgccagtctgcggcttggtccgcggacgatggcatgtgtacatacgcaacaccatgccgcagcgtgctgctgttgcaacactggacgcggtacgtctaccggccaggtagccatcagcaccacgccaaagctccaggctgttgctacgctggacgcggcacgtctgccggccaggtagctatcagtcccgagcatgggtgttgcccacgaggggagaacccgaacgtgttgcctttgcagacattcatagttggcgcggcacatgccgcacctgtaaggcgcgaagccatacgcatgcacgtggcacatacaacctgtgagatagtcgcggtgcctgacgctcactgtgcgcgtggcacttggtgtacgcgaggtacccctagtgcacgcgacactacttgtgcacgtggcacttgaggtgcacgagacacttatggcagtcgtggtacgtgccatacacgacatgcctttggtgtatgaggtggtgctctcgtacaccttgaggtcctgtatggactgtgtgccatgcggtcttgcacgcacacctcgccgcgacgcaggatgcgatcgccggtgacggagggcaatacaccccacaccacgatgaagtacccttgcggtaccctggtgtcgaaggaagacaccttagcgtcggcgacgtgatggccgtgacgcgctgcagggctttagacaagtccgccgcgttgctctctatgatgagcgggttgctggaagcagccatggtcgctctagcaaacacgacgttaaagcatgacgcttcatggctgtggtcagcgcttgaccatagcccatgggtcgagccgacgtattcggccgaccggcacaccgtgctgtgacgagcggggccctgtcgggccgctgtcatggccgaagatgagcagcacagctctctccatggttacgctacgcgctgaccggataggtgctgtccctcgcgggaggcactgcagcatgaacgtgccagcggggcccgagggccatgcgacgccaactgctggttgtctacgagggacaccgcaagtttggaggcacatgcatcccgtgccgaggcactctgcgcctgctagcgctgtgaatacggccactaaacacgtcggcatcgcggccaacatcgccgagggcaggggggttccgcgcggggtgcccgctgcgggcacaagtcactgtgggcgtgacgatgaggcgcgccagccttgcggcggcagcgcccgagaatccgacctttgggtgttcggattctctcgaagctgattggagaatcagatgtgattctcagataagtgggggaggatgtaacggggtacaatcaagtgtacccattacatgaagagtgacggtgtcactctcccgagtacatggtacatggtaccagtagctccgcaagccaaccatttgagtttgtgtgggcttttgtatagttaacttgtagtttgtattacgaccaagttaacctctaccaaaatacagtcagtcttataacctactcctttgtagcaaaccgttccctttgaggccgggaactggtgaactgctgttcacctggatagtaatatccgcacgcacttcctctgtgcattgtgctgtgtgacccggtcacacttttgctactttcgtagcttccagtggcgatgtactacccgcacatgtcatttttcggagtagaaaaactggcgatcgttggaattttcatgttcgcgatggtggaatttgctggatttgtggtgcttgtcgtcttgctgcagaggaagtttgggatctcgccactgtatcaactggcttttgtgctggagacccatgcgcacgcgttgtaaggccatctctttgtttggaccatcttcattttgcacttgcccgtggggcactacggtaagcgttttcaaaggatttgtgtctgtacgtttgtgtgttagctctctcacacacacaaatgctgtgcttttgtatgaaggggttcatttcaacgattaagaagttttactctgggtagtttctccagtcgtagagagctgtctttccagtggtttcgctttgtgaattgatgctgtcaaaacttggaacgcctaagctgatactgtagatatccagaagcacttgctcggaacgctcgtaagtgtctgctctatgacgctgagtttcaccctctccggctgacattcgtatgatatcctacactgaagtggatgtagagttgcatgagcgattaatttaatcgttaccatgacaacttcaagcggttgcacccagggccacgagtccttcacacgtgcacgtgcagtcaccccagtcccttcctcattcctcaatctcctccagcctccatccaccttctctcaatgcggttctcagctccagttcttgctcttgtagcactcgctcactccgttcacggatttctgggtacgtcatgcaacgtcggactagtcgtgccacgcatgcgactaaccatttcctgttggttagagtgccgccagcccaactacctggccaaagggggcaagatcctggcggtggacccaatggacccgtcggtgcaaacggagatccgtatcaagggcgtgtcgtggagcggcatggagaagatcgacatgatcccggaggggctatggggcactgagagccccaactccaagggcacccaggccacgaccatcagcactctgcaggagttcctcgtttctaacggtttcaactccatccgcctctcgctcaacgccgactacgtgaacgccaacccgaagccgcacgtctcctacatccacgcgtacgagaacccggagctcacgacctggaacgacccggaggccgtcgactacatcaacttcctcgctcgagtggtcgagacgctgcaggaccgcaagctcacggtgctgctggatatccaccgcctcaccaagtacgagcaggacgccttctggtacaccaacccgttcgtgaacgtcacggagtcgggcgcctacaaggccgtcacgttcctcgccgagaagctctgtggcacgcgcttctggaacatcatcggggtcgacctcaaggacgagatgctgcgagcgcagtggaatgccaacgcttcagactccgacgagacgaccgactggcacaacgctgctgaggtcttggccaacgccgttctggagcgctgtccgcagtggctcgtgttcgttgggggcgcgagctccttcacagacgctcagcgcttccgcgtggacgaggactacgcgctcagcagccactggaacggcggcaacctcaagaacgcaaccctcaatccactcaacgtgagtgtcgaccacaagatcgtctttgctccgcacgcgcacgcgcacggcgtccgccctcagaactacttctacacaccagacagcaactgcacggacgacgtggagcagttcgagcagcttgggctgacggcggagcagaaggagacgcgctgcgtcgactacctcaacggcacggggactgagagcaagctcggctgcagcgactcgcactttgcctgcagctcgtacgagcacatttcggtgccggagacgttgctgcactacgaggtcgctatgcgcgaggcgttgggcgatctgcgcgctcaacggaaaattccgctcgtgttgggcgcctttagcggtgtctatggggtggcgcagccccatcaaacggccgtgctggactatctcatcgacttggccgcctcgcttcaaggcggatacttttacgccttgaatccggacgtcgagagatactcggaggactcgggggacggccaagctgggacgatggcggtgacgcactacgggttgatgcagacgtcgtcgtggcaagagccgtacgccgacctgcttgaagccctgcaacggattccttcgacggagatcccgtgctttggcggcaaagagagcagcggcggcagctccgtcccagccgccaacagagacgctgcgttcgcgctgctcgttatcagccttgcattttttttatgtgacccatgacaagggaagaatcgagcattcagcaacggctttggagacatcgctggtagtttgcctcgagtctcagattccactgctcgaagcacgcagcccgcaccttcgctcgctctgcactcacatcccatcagtcaatttgctttttcatctcgcaacgatcaagtcaagtggggtccccgatgtcttggcgacagcctgcctaccttttcgggccgagtccgagcgatcgagacatgatggaggaagttctggagctcctggccacggacagccccaacaatgatgatagaaccgcgtcgaccgccgcaagcagcaggagcggcagcagcagcaacaacaacaacaacaacgacaacagctgcagcagcaccaccaccaacaataacgacaatcactcgagtctgtcggaattcaaccacagctcaacgagcaatgatgaccaaaggagcgtggagagcttggagatgattcaagtgattgaccctcggagcgagcagattgctggtcccaatggggacggtggcgaggaagtggggatgcaagcaattcacgcggcgtctcaacgcaggtcagcgcaggagcagaagcaggcaggtctaggcgtggctcagcagatgtcgtcaatgtatggaccccctacttccctacggcgctaaccttgaaattttgttttcccctttctgaaaacaaaagctggtggcacatctcacccactggcctctcctcactaactaacaattccctccgttgttgtcgtgttttggtgttgtgcttcctgcaatttaggttccaaatatcgccggggggaacaatgataccccagaccaatcggttgggcacctggcccacccactcaatgtacgacatctattctatactcgtatcttagctcggggttcacgtgtttccgtgttctgtaggcagcacgatgctcgattcttcgctggcaacccaagtatgcctgctggtgcatcgaccgatgtcgggccactggtgcctggccagctgcctgttgcaactccgccacgactcaccttgcgtgaagcaacggtgtcttcacgcatgacagcgcgagcagcggcggcagcggcagctaataggtcacataccctgccaagtggacagcgtgtccacgtgatgaacgggaccgagttcgacgagcttcgccgtaaagtgcgcatgcagacagcttctcggcgctatcggaagcgcaagaaggtaggacgctttgattgcaaacgtgcatggcttgatcatgctcatttgtggttttcctggttgagtaggaggagtcccgacagcaaaagacgaggatccaggaactgcagtcggagctctctcgtctggaggagctcgaaatgcagtcgcggaactatcgaggacgctcgcaagattcgctggagggagagctcgcgttccacaaggaggtgatcgccgacctgtcgagaaagatccaggatgccgccaaggaagaagtcgactgggtaatgatctaatggttcggctatgacggatgctactggatctactgacaccagatcgctgtgatgttttgcacaggttaacgtgatgagcagccacctgcgttagtgaagatgctacaccgatagttgttttcaatgatttcttgagtgtttttttttccttaagtgaagaggtgacattttttcgtgacttcagtgacaacggatttcctttttcacttttaagtgatacaaatgttaaaacatttttcggttaaccagtttgttgttgagaaccggcgatctcgactagaagtagtcttgaattcgtcatgctgcattggtgagacattgactgcagtcccagacgatccgacatcaaacgtgacactggcgggattgacaggtgcatgttgcttttagttcatttgcccattacgcaagtgtgtggccaaccgacccaatacgtgccatggcgtctggacccccaccaccggtcagcttctgcggcatcgcagtagacgacgtgctggcagtgccagaaatccaagagcttttaacagcagacgctcccaccaccatgcaagaagagcccgccaacgccacgctgagcgccgaaagggccccgggggtatccatccctgctgaggaaatggatatcgagaggcagctaccagaagatttacgccttcaggagaccactcgttcaatgtatggccctgttgctgagccgcaccgtgttgccttgagctcctttgcatcaccttactgcttcaagactacgtgctaaccacggagcatcgttcgtgcccaattcttgacgacatctccatcttcccttgttgtgttccgttctaatgattgcagtccagctagcacggtggcacctgcagtagctgatggaggggaaccagaggcaccaacaccgaagaatgtgccgcaaaagttgagcccctgcgcgtccaacgtgctctccaccacagggcagcatgtccacatcatggatgccttcgagctcgaggatctttgccgcaagctgcaggttcagacggcgtcgatcagccacgacaagctcgaaaaggttcgtcaaacgagaaatattattgctcgtaacagagcgagacccgacgtgttcttgtgtacttgcgctgtaggctgaagcccgtcggcagcagacgcggatccacgagctccgagccgaactgtctcgccttcaaggactggaaactcagctcaagcagtaccagcagcgccccatggcgtcactggcgagtgagctcaacacgcgccagcaggagatcgccgacctctccaccaaactccaggccgccacgcaggaggaactcgactgggtacgtgcgcacactgccaccttttcacctcttcattgccacactagtcactcactcactatcaccgctggaaacttcaatccaaatccaacctcaggtcgacttcatgagccccaatctgcgctaatgaagcccctccgaccaatctccgaccatgcataactttgaaaactcacgtatccccctccctacgagagtctcgcctccatctatttagcgactaacccctctgaggggccccctcatcgtaacggacgcctctcgggcgcgtccccatctgcgttgtacttcggagaccatttgcggtggagcagccatcgacggcctgcgcgtcggcgaggaattatgcgcatccctatctgggaggacgaggaagaaattgatggtggtgtgggcacaagactctagtcaagtgacgtgggcaagtttgccgtttccgtctgcggagaagctcatcgacgcgtcgagcggagctggtacttcgacagggtcttgagcccgtgcagtcgctattcttcgcgtcgttgcttgcgcggacagtcgagccgctgctgaggaataatgggccgctgacgctcaagacatcgactggtttggaggcgaagaaggtccagctacaggagttcaggacgaccgagaagtgtacggacgacgcaaagaacgcggctacgtcgaactcttcagtgaagctctcgccacgtttgtgtataacccaagagcgaagacttcagaagaaattcaacaaatagagcggaagcagggcggcacggggtttgataacgagaatgccactggctgtggagctttatcaggcggcagcagcagcttggattcgtcgagctctcccttcatgctccagtacaaccgctgagcgccttcgcgtccatcgtttttcgaggacttacaagctcaacacttaacctttgaggtttctaccaagacgtatctccctcggctgcaactcactccgactccgccgctggcctttggcgacgttcgttcacacgatcgcgcggatattttgtggtcggtcactatgctgcaagccctcgaacggtgcgtgtggacatgctgcaatcccaaagtctagtggtaaaatttcgctccgacgcagcttcgaacgttcaacatcattttgacgttgcgcatcaacgacggcgtgttggagatccctttgaaggtgctgggttttgagcggccctgttccgactgccagtgagacgctcgtaggtgatcgattggtgctcctcgctgactttgcgctaaagtaaaactttcatctaccggaagagatcaaacaaataaaaggggaaaatgaatggcactgcagagctggaggagtttccttttaaggtatgcctaagtcctgccaggagctggcacgccctgccgacctccgggctgatgtttcagtgcgcttcaggcatcagcggagaaggctccgtgcaaggacccccgggctttgacgggtcgaatacatgcacaaagttggcaaacaagaagccgcagacgcgaaagctggcgaagaagcagaatgcccccgccctcagtcgccaaacgcgatggaacgccaacgtctccaattaagtatccaagtccgacaccaagtcgctaatgtatttgccgccgccgtgctcaagcggaactgtccgcagtcgctcgtattggttggccttcacggatgctcagcgcttccacgtcgataaggactacggactcgcagacactggaacagcggcaacctcaagattgcgaccttggttccattgacatagtgcttggcagacagctcaagctgcctatatcgtcggtacagttgctgtcggtcgtgtagcagtacgacgtaatctcaaagtcggctctcaatttcatgaagtgcgctctcgggtttttgaatggagccgtacaatagtgctgtttccaagccagactccgcgcgcgtgcgcgaagacgacctcatttcaaggacctttgaatggatcgagcgaccgggagcaagctcggcgcaccgcgttggctctctcttcgcctgcggttcgtacaagcacatcacgactccgggcactacggactacctcatcgccttggccacattggctcaaggcgaatacttgtacaggttgacatgtgaatggggatgaatgccgtcgactgagatcccgtggttttggtccggcccaactggaaacagagacgctgcgtttgccctacaaggcatcgccattttgctgtgacccacgggacgagtacatttttttctcaacggcttcggacacgggtctcagacttcaccgctcgaaacatgcagcccgcattttctccgcccactccccgccagtcgccttctttcctcgcgttcaaacaatgtcttggcgatacatggccggtccgagtccgagcgaccatgacatgatggaggaagtcctggagctgctggccacggacagccctaacgacgacaatagtgtcgcgttgagcagcggaaacaacagcaatgggtctgtcgggattcgactacggctcgatcaacgacacgagtcaagacagcggcgaaagctcagagacctggcaagaggtggagtctcggatcgggaaagcattgtgctcaaacgaccactgcggaaagaagacgagggaggaattttacttggtgcctggccaagagctgcaggacaggcagaagtgcaggagcagacgcaaatagcagaggcagctctaggcgaggggcagcggttgtcgtcaatgtatgcgactcctgcttcccaacacgggtgtttgtgcgctaacctcgaacgtttattttttcctgaggaagttgctaccacctcgttcggagatcaccagcctgacgagtttttttgttttgttttgcatttggtagtaggtgcttgttgggaattaggccccaacctgcgccggggagagcgatgatggctctacagccagctaagagtccgtggccgtcacgcccaatgtaagccagttcttgatacgcttgtcgattcggtttgttgacaaaaccatgccccaatctttgctggtagccccggccggattgctgcagcgtcgacactgatcggaccaagtttgacgcgcgtggcggcccagctgctaagtgcacccccaccacggctcgcctcgcaacctctgcgtgaagtgcacgagaacatgcgagctgcggctgcgacagcaacggcgtatgtcctctccaatgggcagcgcgtgcatgtgatgaatggtgccgagttcgacgagcttcgccgtaagttgcgggcacagaaagcctctcgtcgctttcgcaagcgcaaaatggtacgcctgcgtgcaaactaggagggctcatcaggctcactgacagctttattgaatgctggcaatcgcgcaggagcagtctcgacaacagaagaagaagattcaggagctgcactccgagctctcccgcctgcaggagctcgaagcgcagtcacgagactaccagaaacggtcgccagaatcgctggaagtggagctgaagctccaccagaaggagatcgctgatctatcgagtacgatgcaggatgcagctaagcaagaagccgactgggtaaggagtgcttggcgagtcctgttcctgttgttgatggcgctttgttgaccttgttgctctttggtttctttcttcctctgtgttgccatgtccgtcagattaacgcgatgatgagctgccacctgcgcaactgaaaatgcagctgctcctgctcccttcgcgtttgtcctttgagtgtccagtttgctaattcagctccagtcaacaatttactatcatgaatccccgatcatagcttcaattacaaccgaatataagtaaaatccgataactagtttttcaagaggatcatggattcgtcatgccgtttattgggcctgacaatcgacgccaaaaaggacagggcgagctcgcgcggcgccttcacttgcctattcacagttttggagctcgcacattgattgcctagcgaaacgccatggctactggtgagtttcagcggcattgcattagatgaggtgccggcaataccagcgatccaggactcctccgccgaaggttgggcgcgtttagcgttgtgaacggagcagcgcagccacatcaaacggccgcgcagggctatcttatcgccttggtggtcgcaccgcttcaaggcggatacttttacgccttgaatccggacgtcgagagatactcggaggactcgggggacggccaagctgggacgatggcggtgacgcactacgggttgatgcagacgtcgtcgtggcaagagccgtacgccgacctgcttgaagccctgcaacggattccttcgacggagatcccgtgctttggcggcaaagagagcagcggcggcagctccgtcccagccgccaacagagacgctgcgttcgcgctgctcgttatcagccttgcattttttttatgtgacccatgacaatggaagaatcgagcattcagcaacggctttggagacatcgctggtagtttgcctcgagtctcagattccactgctcgaagcacgcagcccgcaccttcgctcgctctgcactcacatcccatcagtcaatttgctttttcatctcgcaacgatcaagtcaagtggggtccccgatgtcttggcgacagcctgcctatcttttcgggccgagtccgagcgatcgagacatgatggaggaagttctggagctcctggccacggacagccccaacaatgatgatagaaccgcgtcgaccgccgcaagcagcaggagcggcaacagcaacaacaacagctgcagcagcaccaccaccaccagcaccaccaccaacaaaaatgacaatcattcgagtctgtcgggattcaaccacagctcgatcaacgactcgagccaagacgacagagagagcgtcgagagcttggaggtgctgcaagtgatgggagctcacgactgtgatgagaagaaggaggagggccagtatctgactggaagaagagcagtgcaagagcagaaccaggcagcagaagcagctctaggcgtgacttgcttgacgagtattaggcctcaaggtgtaccagggagagcaatgatgtctttgcctcaagccggtcgtttgagtccctggaccccacgcacgatgtaagttttactttgcagcggtctgctcgtcgacataaacacattgatccctttgtttctcatgagcacagacaacacgatgcacggttctttggtggaagcccaggtacggtctcggcctttgccgtgccaccagttgcagcgcagagaccggtcgcacccccgccccggtcgaccgcacaagcttcgcgaaatcgcaggaaaatgcgcgcggcggctgcgatcacaacgtcgcatgtcctgttaaatggacagcgatttcacgtgatgaacggggccgagttcgatgaacttcgccgtaaattgcggatgcagacagcatctcggcgctatcggaagcggaagaaggtacggtttggttaagaattttgtgctaggaaggacctgatgtgcctcaactgtggctttacaggaggagtctcgacaacagaagatgaagatccaggagctgcagtcggaactcgcgcgccttcaggagctcgagatgcaatcaagaaactatcagcaacgctcggaacaatcgctggagggcgagctgaagtaccacaaagagaagatcgcagagctctggggcaagatacaggatgctgctatggaagaagtcgactgggtaacgctgatccaacttttgcttgctactaaggttgaatttgctaacatttgtgctgtttcccactgggtgtatatgtgagcaggttaacctgatgagcagccatctccgcaagtaaagctgttgccccacgccagaaccaccaacattcgtttttagtattcgtaaaatgtggcgaagaaattccgcgaagacttgtgtatctctctattttgcgtgcgcacagtgacatgttgatgggagtttctggtggtcacgactagaaaactgccttggacggacgtgaggtggaagcaagtgcatcgagcatgacgaatctgggctgaacaccattcgtttgcaaacgaatggtcttcagcccagattgcaaacgaatggtcttcagcccagattcgtcatgctcgatcggtgagacatccgaaaggcctacagtcccagacgatagacgttaaaagggcactagtaaacggcttgatcgagaaggcattgatggacaggccttcactgcacaagttatcatggcctctcgaccaccaccggccagcttctccgatatcgcagtggacgacatgctggcagtacccgtaatccaagagcttatagcaacagacgccgccctgcaagatgggacccttaatgataacaataccgccgaggacatggggaatcctcctccaagaacagtcatgcccgaggaaattgatatcgaagcagaagatatgcgcccccaggagacgacacgttcaatgtatggccgtactctgagcagaatcgtattgccttcaactccttgcatcaccttgccgctttgttctaactgtgcagcaccgttttgcctcaaccataacaacgacttgtttcccttgctatcctgccgttgaaatggttgcagtcctgcttgcatcgaggccgctacgaaagcgagacagccgagcgaaaacgcgcagctccaagagaaaactacatctgatacttcggacgtgctctccaccacagggcagcgtatccacgtcatgaacgccgccgagctcgaggatctttgccgcaagctgcaggttcagacggcgtcgatcagccacgacaagctcgaaaaggttcgtcaaacgagaaatattattgctcgtaacagagcgagacccgacgtgttcttgtgtacttgcgctgtaggctgaagcccgtcggcagcagacgcggatccacgagctccgagccgaactgtctcgccttcgaggattggaaactcagctcaagcagtaccagcagcgccccatggcgtcactggcgagtgagctcaacacgcgccaacaggagatcgccgacctctccaccaaactccaggccgccacgcaggaggaactcgactgggtacgtgcgcacactgccaccttttcacctcttcattgccacactagtcactcactcactatcaccgctggaaacttcaatccaaatccaacctcaggtcgacttcatgagccccaatctgcgctaatgaagcccctccgaccaatctccgaccatgcataactttgaaaactcacgtatccccctccctacgagagtctcgcctccatctatttagcgactaacccctcctcataacggactcctcccgaatgacatctgcgttgtacttcggagaccatttgcggtggagcagccatcgacgtcctgcgcctcagcgctgcagaaattaggcgcgttcgtgtttggacgaggaagaaattgatggtgatgtgggtggaaacaagactcgagtcaagtgatgtgggcagtttgccgtttccgtctgcggagaagctcatcaatgacgtatcgggcggagctggtacttcgacaaggagttgaactagtgcagtcgctattcttcgcgtcgttgcttgcgcgcagctgcggaataacggaataacgggccgctcaagggcacatttatcgtcacctacccacacctgtatattatccaatgatatccggctattttgactggataaacttgtaccccgccaaattagatattgcctacagtatcagtttttcagataaatcggggttaccgtaacctaaatatgggttgtgcagttcgatgacaactgagccactttaccgctccaaagccagcacgctggtatcgagatgcctccatccaaaagagcgcgaactgagactcctgacgccgaggcggaaatcatcgcagaagctcaaacttacacaacagataaccgcggcagagctctcacgctcctggaacgtattaacgtcctcatcgtcatagccaacttgaagtctggcgctgtcaaattaggtcagaaagagccactcgcagtcaaagttggccgtctgttgtcacgctcagccaacacagtccgtcagatttggaatgactttgccaagtatcggtctctacccgtggcatcggcgccatctaaccgtgagcagaagccgtcccgtatattagcgactgttgatatggagaggtctgtgcgcgagtttattcgtgagcgcagcgcgattcgtgagcgcacggtagccaaggacgtcatgcaccacctcatacagcaagagttgttagtcgtcgacgtcaccgacagtgccgctacggcctcagcactccgcaccgtccaacgcttcgtaaaacgatgtggtttcaagcggggaaagcggaaagggtcgacatatcggttgtcagctgaaaacgaagctaagcgcgatagctacgtgcagatgatggcatgtgaaagtgcccatcgcgttcgaacggtttatctcgacgaaagttatatacatcacaactactccagtcataatgactccctttatgacccggcggaccccaacgtgataaaggagaaacaaaagggtcgccgattttgctttatcgctaccattatcgacaaatatcgtaacctcccggatgccgatcataccgaggctgacaaagcacagtttttgccggagacgcttgacatttttgagggaggcaagcaaactaaggattatcacgggatgttcaatcatgactacttcaaaaattggattgaaacgctgctcgtttgtctggaagaccgccaactgcaccactgccgcatcgtgatggataacgcaaaatatcacaagaagttgccgcccaacacccccgaaaagggagtcggagatccgacatgcaggctgcttgtaagttgtatggcttgccttacgctgaatctgatacaagggcgatcatgtgggaaaagctgtcacggcacattgctgagcacgtagagccagagattgtgactatggcgaagaagaagggccacgaagtagtgttcacgcctccacactactctgatttacagccgattgagtatgtgtgggcaaatgtaaagggagaagttgggcgccagtacaccaaggatactacattccaacaggtcagaagtcggtttgatacagctttcaaaactttgtcgtcgaaaactgttcaaggctgcattgacaaagcaagagcccacttggtggatctgaatgctcagatcaaaagttatgatagccgcagtgaaaacgaggattctaacagctccgagagcgacgaaagtagtgctagtgatgactacactagctaatattttagatagccataagtaagtctagacactgattctaagaaatatgatccgatacatttgtagccctgtacgtcatctttcgatctatcggtggaagaatgaggataacgagcatccgtccagagtatcatttctctacgatcatgactctgcgactaatccactgccttatcattggccgagaaaaatcataggggtggtaatgatttgcccaaatgcaaggcagatttataatcagcgcacatattatggggtggttattatataatttggggaaaattggactgctgtttctgtggaaacgacgccgtgctaaacagtgagacgcacattttcgcaatgagggaagcgaggcggtttttgtgataccaaaacatgtaggggttagaaaaaacctctcgatcgtgtcgtggactgtaaaggcactgagtgggatcgtatttaaaaggagtgatacagtacgagtccggtaaattacgcaaattaattaccgacgattttcgatatttcaaaaatcgaaatcttgacaccctctctccccctttctcccatcctccaaaaatccactggctctactggctctcatttgcagtttggcgcgtttggacctcaagtgactggttgggcagctattcgtgtacgtatagtgagcgagcccccccccccccccgcctcctcctcctgttcccccccgtcctgctctctcatgtgtatgtctatcgctagcaggttaatacacggactggtacaggcggctttgacagagagagagagcaggcagaactgcgcagaacggcagtcggtgtctcagactaagcgagggctgggagactacgcaaaggctgcacgtatactgagcgtcggggggagtgtctgagactgcgcgatgactgggagacgcgctcaggcgctgctcagcgcctgggcgtctgctcgcaggttaacgtacacgaagctggaactgccagaccatgcagcgtttgcgtgaggtgagtgctatcgctatagctacgatggggggaggggggttcttaaatgtattactgcctatcctttacaccaggacgtgacgctccgagatgtccacaacatgatttcaaaaatgcttgaagagcgccgcgcaagcgcaagggtcacccaggacctacggctggatagattgcgctaggctgcacggacgtggtgaagcgttgagaccggggataccaagaacatcaagggttgacgcggtggtgcttcctcgagttgtatacgtgggcgcagagccttattcaagctgttcagggtgacgctcgtatcgtataatacacacgtgtacgttcctgatagtctgtgtacctgtagataccgacagggtacctattggtgtgtgtgtgtgtctgtagataccgtacgggtacctttaggtactatgcatactcgattgatgtatctacaggcactttaagaattgtatgcgtactcgccttttcagggtcgatttgaccgtgtgtgaggcagttggatgcctggccaactgagcgaagatcgtaactgagcgcttcggtgcgtcgttaaatagaagttgacaatacgcgggttttacgttgtcatggcaatgctgcaagtctaggctctctccattagtgtaacgtgcagtttgtagagtagcacagtattgtcaggtttataacgtagtttagtaggcacgtcaatgttgctagcgcaactctacacccgattggcgcgacctagtcctcaacaactcccgtactagcaggcgacaaggtgatcatactgttttcttgttcaatacgagattcgccaagtgctttttacattcgaacgaccgttgccaccacttcctatttcctgcaacattcgtgtaacatagagctcttgaagcattcagagccacacaacaaaatctctacatttggtgaaatttatgaaatctatttgaatagaataccctcttttttaacctcggtaccaatattacctgactcagtgccatttggtacctagagacagacgaatgcctgcaggtcctgtacccatgtacctcgatggcccggttatgtgcttcccactcagtgcctttatcaacgatcagatttttttcatgtctgtattccgacgtgacatggaatacattaatcgaccaggtcccaaacgccgctcccaatgaggagagccaatcataagtgagattccaaatgacttcaacaaagtatggactggtttatcggctccaaagccaagaaaaaaccttaaggttttatttttggccggctgcgcagccttctccgccttcacactttccgccccgcatctccaacacgacagcgcgctccgagcgtgccgcacgcctcccccgccgaccaccccagacccgagtgcccccaggcgcgccccacgcgccccacgcaaggacccgtcgaaagcagctacaaaacccggcagggcgggtgttatgctgccggttttggtagctgtcggccaagcacgaggtcgtgcgcgctcgctgacggtatgtgagcgtttttctattgtgtatgactttgtatcgggactgacgggaatccatgcgctgtgcttaagttgtgggatggcgatgacgtgtgcatttgcgccttgaattcgattatccatgttgtatgaataggaatgtattaagagttaatacaagctgcgtgatcctacgactccaagtctttttgcttccattggtgactagctggtgtgcagcggtcgacgatgccaccgttcgctttgcgggtgataaatgctgagcagggcgcgtcgtacgcagagcggtggtcagcgcgcagctttctccagcgcttccgtagcgaccccgcggttttggatcggcctttaccgtcgatactcccaagcgcagcgttgaccttcttgtccaagtcttacgctagcgtccagacacgctgcttccacagccgatacgcgacgccgtcccggtccagtggcgccgttggtacgtctacctctcgccctgctgctatgatcatgatgttgacgcctgccttgaggtcagcgcgaacaaactgttgtttcttttgggttgccgtgtgccacagctcctgtgtgtaccagttgtagaagcagccagcaagagagtgcgcttcaacgacggtgtcagtgctcgcctgcggggcctggccagcacagcgacaaggagcaggaccgtcagcgctggtggccttgctctcgtgggccgcgacgagcttctgaagtgtgcgctgcattgctgcgatggacgatagcatctgggtgacggctgcggcaagtatggtggtgtttccattgctgcgttcacccagctgtccgaagttctccgtttgccaagccgtgcgaagctgccgaccccaaccaatgcacgtgtccagcgagagccgagctcccagcgctacgttggttgcgtccagagcttcgtggaagcggtacaggtaatgcgatgtgaagcctgtggcagcctgctcctgctggactgccgtcacgacgtcgtcaagatggatgagcagggacgcgagcgccgcatccaggactaaggcgtcaacgttgagcgtggtgtccgtgaagccgctgacgttcttgaagagctggccgcgcagggttagcagctgggcgtactcgagcgcaggaagaagctcgctcaaggtggcaatcctgggcgtgacgcatggcaggtgcgggtctcggtatccagcgaggactttgccgacactctggtcctcgcgtgtcgtggtacccacgtacgcgaacgccttcgtgagcgagtccagcagccaagctccccgggtcgagatccactggatcgcaagctgcggtgaggcgtttgcatacgctgcggagccgcggcgcaaggagtggctgctcagccctgcggtgagcgtcgggggcagcggggcagaggcctgggcttggcgctcgcagaccatggtgatgacgtcgttaatatacttggacacgttgggccttcctctcacgcgctttgttggtggctcgttccttggttcagctttctcttcaaggttctcccagtagagtatagcttcgtcttggctgtaggtcttctcccctggcaaatccgatgccgccgcgtgcggcactagcgggaacacatagctggaaggctccgacgctccgacgaacagcattccgaggccgtgcagcatacactgctcccagtgagtcgcggccttgtaaattgagatgccttgaaccaccgaagtcttgattcgagctagatgcagaaagagctcccccgatgccgccatagatagctggctctttctagcaaaacaggtatcgatcgctcgaccaaacgtgtgccacattaacgttagtacagcagcgtcatgtaagctcttataacctgagccaacccccttaatcgcagtttcctgcaccagaacacgcaagtcgccgagcgtgcagcctggagcttcaccagtctgcacgccagctagcaaatttcgctcctcaatagttgaacccattttgtcgcgtatattcgcaattcgcttgctgtctgacaagtacagagggtaccgctctcggagcaggttcacaacttgggacatatagcccacagcagtagccttagcaagacggcctcctcgagcacttggcttagtttgcaagaaaatggagaaggcggttagcaaagagtaaaagttttgacttggtagagcatcaggaatagacagcgacttcgcaatactagcaattgactcctcattcatgttagcaagagctaagaattcgctgaagcacttcatcgccgctgcctcctgccctgctgtcccttgcgggatgtcaagccctctcggcgctcgctgcatcttttcaaatgggagaggagagaaagcagacgagtcacagccaccaacgatacaatcatgatttgtattgggaatttgcggtcaaatatgagtaatgcaacaattacactaaacttttgtattggatattattctagcaagactgtaaattcccaaaataattgggaaaatgttgggatacacacgaatcgatcgtgattggctaaattcattgaagaacttgtcctgattggatagatgcaatgacagagaagcgcaaggaatgccaagttgggagaaagcttccttatcctacaataatcaagatagtcccggtgcatcaaatcgtacatatgcgaacaggataggcgacgtcaattgtagcgacgtaacaacgatgcagcatgacagtgtgagcagcgctaactgcgagcttggttgctgcatgcacaaggtttcgacgccaagcaaaccccacaaggttgtttgagtaggtggcaggcaaggtgaggtcaatggacccgttagctcatgtgtttatctgggtaccggtcaacatagagcgccttcaggctcagcttcagcagaaaagtgggtcctccctcccgcaattttcagaccgggtttggaggtggaggaggtggcccgaacgacggcaaggagctgcacattactcagtggacgcagcgttgcgtaaataaaaattgcaataaaactattgataaaattggggtcaataattacaattagaaaattggctgcaatgattttattgtattgtacaagacagttgacttgataactgtatgtgcgtgggtagccaatcaaatggtccatacagacccctatacaaaccgcaagaatacaattcaatgtctacattgtacaattaaaattgtagcgtgacggcaaatctcaatcattttttcaatgtaaattgaccactgtggacggctgcaccttcagtaaagttgtcgtcacgtttgtgtactatccaagagcgaagacactcagcggattgagcgaagacactcagcggattgagcgaagacaaggtagtgccgcgttcaatgaaggacgttacgttgactatggcgcttcatcaagcaacaacggcagcttagactcgctcaagtgcaagcttctgagttccgacgccagcctccgtacgaactcgcagctttgacaggcgctgcagcgctggacgacttcgcgtttcgaggcacaagcaggagctggcacgtcgtgccgtccatcgggctgaggtttcagtgcgtattgggcatacggccacggcccgaatgaaacgagaagaccccatgcgaggactcccagaccttcgcaggatgaacgcacatgtacacaggggcaaaagagaagttgcagcaggcgagagctatacaacaaaccgaacgtccgtaccctgcgttagaacgccaacgctgctgaaggcctagctgccgccatacgctttccccgtggctcgggttcgttgggggcgagagcatcttcactgacgctcagcgcttccgcgtcgacggggaccacgccactggaacagaggcaacctcaagaataccagctcggttcctatttctcgaattacccgacgcagtacgtctccttctgcttggcactcacttcaagctgctcgacgcgctctaaaacgtcggcatagttgctgccggcagtttagtagtgcccattgtacgactttgatctcagagtcgattctcaaatttaagaaccgcacacccgaggacgttgtgaaaaacaacgtgcactggtcgaggttcccagccggactccgtgcgcgtagacgactccgtttgaagttgcgttgagtggatagagcgagctcgactgcagcgaattgaattgaacttcgccggtttcggagacctcgagatcgccatgggcgggtactgcaaggcggatacttttacggtttgaatttggacgttgagaggtacttggaggacgcggcggacggccaagcagacggtgacgcactaggcgttggtgcagacgtcgtggcaagagccgtacggacctgcttgaagtgcggatggcgtcgatcccgtgctgtggcaaaaacacaagttagccagggacgctgcgcttacactacgggacacctgcgttaaattttttgtagcgtggagaaccgacgggacgagcgactttggtaggcacttctcaccgggtttttgacacgggtcccagacttgacaaaaaaacgtaaagaaaagtagtcctgccgtccaccaggcactactcgctgacgaagcgtttctcccatcgaatgtcctggcgaccaacctacatgttcgtctcgagtgcgagtgaccgcgagatgatggaggaggtcctggagctgctagcgaccgacagccccaacgacgatgacaacactgttgctagcagccgaagcagtagcaccgccaccaaccattcgagcatcgactaccattcaacgaacggcacgagccaagaccaccgagggagaagcgagtttttggactggagcgaggtggccatgagtccacgttgtgactgtgaagaggaggagaaggacgcaaggcacccagtgcctggacggtcatcaacgcaggcgcagaggcagagaagagaggcagttctaggcgtggagcagcagatgccgtcaatgtattgctctaatgccttttctttttgatgaaaaaggtttctcatggcgattaatcgccaccaccccagtccaatgcgcttgctgtttgtgagctttcgacgcaaataaaggtgtgttgcagaagtactaaataaagtgcatttcatttgaatttgcaaagtggaaagtgaaaaatgcaaactttggaagagtcttcactggcgtaccgtaggcaggggtagcccacattccaccgttacccagtcgacttctttcttggcggcatcctgggtcttgctccgagatctccttctcgtgaagcgtgagctctttctcgagtgagtctcgcgatcgtttcttattgacccgcgactgcttttcgagccctcgaagtcgcgcgagttccgactgtagctccttaatctccatcttttgttgtcgtgacctcctgtacatgtgcagaccagcaaggccacaagtcagcaagaccaggctcttagcatcgtttgcaatcaacgcgtaccttcttgcgcttcctgtagcgccgagaagctgtctgcatctgcagtttccgacgaagctcgtcgaactcggccccattcatcacatggacatgctggccacttggcaggacatgcgatgtagtggttgctgccgctgctcgcatttccttgcatgacgattcgcgcggcttcgagatggatcgtggcggtggtgcagctggaacccgcgctactggcgggggtctaacgaatagcgatacggcagcagtcgtacccggggttccactgaagacttgggcatcgtgttgtctacagatcgcaaccaagcatgttaggaaaattggctactacgaatcgatccgagatgactcgccttgatcgcgccaaccaggaactcttgcgagttccttgctcttgtagagatatcccttctctccccggcataacttggagcctaatggccagtaccggtgtgcaaagtccaaaatatgcggaggcaatagttgagacgagcgacaataaattacatgtagagcaataaatagaatgggaagggtgttgaattcatgagacattaggaggactgcagtcccaggtaaaaaaaaatgtcaacggcacccattagacgggtaaattttacttctcatttcggtcctcgcatcaccaaatggcctcgcggccaccaccgtgcagcttctccagcatcgaagtcgacggcgtgctggcagtaccagaattccaagagcttctagcaaccggcgcccacgtcgaaacgcaagctgatatcagtaatgataacgagtccacgttgattcctgtcgaggaaatgccgggagtattcatacccagaagcagctaccagagcaattacgcacccagcagaccccgtcttccatgtaaggccccagttctgagctgcactttgctgccttcagctccttgctttttgctaaccccgcagcacgacgatgtctccttccttcccttgttcccttgtcatttactgcagtcccgcgactacttctactggggacgcactgtcacatgaaaatgtgctgcaccaagcggaaactcgcgcagcacccgatacgtccaccggtatctcaacgggacagcatgtccgagtcatgagtgctgtcgagctcgatgaactttgccacaaaatccaggcgacgatgggtcacgataagctcgaaaaagtccgccaaacgaaaccatgtgattgtagaactttcttctcatgtgcttgagtgcttcctgttgtaggctgcagctcgtcagcggaagacgcagatccagtcgctccaagctgagttagctcgcctgtataagctcgaggctgatctcaagcagtacgagcagcgccccctgacatccctccaagacgagctcgagacgcggcaacaggagatcgccgagctctcgaccaagctccagcaggccacacaggaggagcttggctgggtacgcaccgctcctttcttgtcactatcacgcgagtccctaacgtcgttgcaaactccaatccaatccaaatccagatcaactccatgacctccgatctgctcgaatgaagaccccccccctagttaacctcatggagccatgcatacaccatatctatccccaacgcgtctcgccccacctcccttctcctcgccctcctagagctattctccactaacccccgcctgcagtaacgcgcgcctctcgggacgcctctccagatatctttgttctactttggcgccatgccgtcggcgtccgcggtggggcggccatcgacgccctgcgggctgcgcggggatcgcacctcgtcggcgctgcaggtggctccgtccgccatcgagttctcggccttcgagcgaggcgcgtgctacgtcgcgactctgagcgtgcgcaacgccagcgaccgcgtgctgcgcttccggttggcgccgccgccccacgcgtcgccgttccgagtcttactgcgcggtcgggacctggccagtaccgagaacgccacggtcacgctgcccccggggctcagcaccaagtacgacgtcgcgttcgagctgccagagaccgaggagtccaattcaatcgacgacgaccatgaaggggtcgagtccacgcccgccatcgtccacgacgcgctgcagctccgcggagacgacgggtccgctcttgaagtgccgcttatagctcgacgcgcgtgtccgttgctggaggtgacgccggcgctgtgtgaactcgggcccgtggtgctcacccagcggtcggcgcggttcgtcgaggtgcagaactcgggtgccaggccgggcaagttcatcgtggacgtgctggatgccggcaatcagctgagcgctggtagtactcagggcagttcacgcgcggggatcaccgtcaaaccgcagagagggagattaatgccgcaagagactgttaatgtcaaggtggaggcgaacgggctcgagacgggcgcgttccgaggaattgtgcgcgttcggatctgggagtgcagaggcggagaagaggaagaagacgacgatgtggttgacgctgcagcggcgcaggactctggtcgtgggagtgcgaggagtgcgggcgggttgccgcttccgtctgcagagaagatcatcgacgtgtcagggacggtcgtggagcacacggcggagctggtacttcgacagggtcttgaaccggtgcagtcgctgttctttgggtcgttatttgctggcgagacgcggacgatcgagacgctgctgcgcaataacgggccgctgccgctgacgttcaagacttcgatcagttttggcggtggtggaggcggtggaggcccagcgacgggcgttgaggaggaccgagaagcgtacgaacgacgcacagagctgcgcattactccagccgacggctgcatcgaccccttcagtgaagccttcgtcacgttcgtgtataagccaagagccaagacttcggaggaaattcaacggattgagcggaagcagggcggcgcggggtttgataacgagaatgaagctgactatggcgcttcgtcaggcagcaacagcagctcggactcgtccagttcccccttcatgctgctcccggcccccgcacagcctctgagcgccttcgcgtccatcatctgcgaggacttacaggctcaaaacttgactttcgaggtctcagccaagacttacatccctcggctgcagctctctccgacaccgccgttggactttggcgacattcgttcctacgatcgcgcggatattttgctgtctctgaagaacctgtcggggctgcccgtgcgcttcgaagtcgacaaaggcgtcgctcactactctataagtccacgcgcgggccgcctggacgtgctgcagtcgcaaagtctcgtggtaagcttcgccccgacgcagcttggaacgttcaacagcattttgtcgctgcgcatcaacgacggtgtgctggagatccccgtgaaggtgctgggacgagcggctgtggtcggcccagtgccccctgtcagggagcgacttgtaggcggtccaacggcgctccccgccgactttgcgcccaagtacaagttcctcctgccagaagaggcaaagcagacgaaggggaaattgtcaaaacgctttcgacgccagcctccgtacgaactcgcagctttgaacggcactgcagcgctggacgagtttgagttccaaggcacgaacaacacgcagttgacctactgcgtcaaggaactggcgcgtcgtgccgaccatcgagccgcgtacaacgactacctcgctcaatgtcgagttcagcgagaagctaaagctaaagggtggaaggggaaggcccaaggactcaagtcgagtgtcgttcaagctcggggcaacaaccaggaagacgacgacggtgttcccagctcaggaggtgtcgatctcggaatggatcgagagagcaggccccaaccacaagagctacgcctgcctccatccctgatgaagccgaacgagccgctctggctcaaccagcatcctgcaggggggaatgcggggctgtcgaaggcctttttcgacgagttcaagctgattaagaagaaattcaagtcggcaccggccacgccagcggagctagcggactgcgctagaacactggagttcgacgagctggagcaggtcgtttcaggtccaaagactctcaactttgggcggttgagtgtcaacggcagcgcgacacgcagtctcacggtgcagaacaacctgcagcacaacgttctcgtcgctctgcacttggctgcaggcgcgaccaataaggacggcacgccgggacagatcgaagagctcgctcgcaagacaactctgacgtcgcaagttgtccccccgcactgcaaggcggggtttgacttggttttctgctcgtcacgtgaacaattcttccagcaggcgatcacgtactcgctaaacggagttcacccgcgtcaggtcaccatcgtcgcggaggtcgcacctatcgtggtcgaattggcgccagaagagctgcgctttgacttcggagcgctggacctgagcacatccgtcgctcgagacgtggtcatcaccaacacttgcgactctgaagctccgttcgtttggacgcgcttgccactacttgccacgcctgacggatcgactcgccccgactcctccaagagcaacgcgacaaccacagtcaccactaacacgatggccgagaaaggagcaagcgctaatggctcagtagctccagtgtttgaggttctgccagccagtggaaccctcggcccatcggctacgatggtctgcaaggtcatctaccggcctccatcgatgtctgggctggccatgacggcgttggggatttcacagaggagtggagcgatgtggctggcccaaatgttccagttagacgtcacaggcggggagaagggcatactcaactgccgagcgctgctgcctgacgtgaagatggtggctcgggagaagaaggtggactttggcacgatttccgtcggcgtagagcgcgacaagcgcatcactttgtccaacctgggcatgcacacgagagcggtgttctacgcgagtgtagaccctccgtcaatgactacaacgatcggactgcaagtgagttccgcgcaaggtgtggtagatccgcaagagtcgactgaattggtcgtgaagctgctacctcatcgtgccatcacgttggacggaactaccagtggctctcaccaggtgaacatcgtgataaccgtacgaggaggcaaagtccttcgccttccagtgaccgcctccgttctagtaccggacgtcttcctcgctccagtcgaggctatcgactttggagaggtcgttttgggcgtctctgtcccgcgcgtgatctcgctcgagaaccacagctccatccctgcctgcttgttgctggacttgggctcttccgccttctcggacgagttcgcaatcgctacgccgccgaggttgatcgcgcaccttgaagacgccagcaacatcttcgtgcctttgaccgacgacaagcccagacatggtggagccaacacccaggacggagaggccgatacagatgacgacctgtctgcgcggtgcgtcaagtggcagatctgcttgccgccgcattccacggtgtcgtgtcacctcgtgttcacaccactgaaagagggcagccatgaccttgtcctcccgctccagatcgctggagtagggtcaagttcgggccccaacaacggagctcctgcaccacttcgacgtcgagtaatagcgcgagccatcgtaccacgactgcggttctcctcctcgaccatgcacttcaaccgctgcgttatcacacgtgaaggcatccggaaagtcccgtacacgaagcagctcgtgctcacgaacgatgacgcgcagccgattcgatggcagattgatacatcgcgcttgaggcaagggaatctcgtgacgttcgccgctggagccgctgcagcagcggcagcagcaagctccggcgccgcagctcttgcgaagcgaattgcatcagcgaacccgacgaatagcgcgaccgcagtcgtgttccacgtcgcccctgattgtggagaattggctcctggagaggaagtcacgattcgagtgagtttcctgccgctggatgctgtcgagtacgcggaagacgagttgccgctgctagtggacggtgggccgtacgtgaatttgagtctaagaggtgaaggaatccacccgcatctgtccttctcgactaatcgggtggtgctgcctaccgtcccgcttggagtcactgcaaccgcgcacatccaagtttacgccacggggtacgaccacctcgaactcgcttgtcgagtgcctctggatacgtcacgagccccgttgacggtgctgtttcctcgtgggaaaacgctcagtatggcgtgcccgagtcttcctgttgaattgcgcttctctagcagcgccagtgtggctttcaacgccagactcgagttcttcgacgccgacggcaactcgtttgcactgcccgtagctggctgcgcagagaattgcttgttcaccaactacaactttatccagactcaaaggctcggtccagagctaatggaagacggtagcagtagtggcagttcccctcgacactctccacaacggaaagagtcggccaagacggagcttgaagccgattctagcagctcgaaagccaacggggagaatcgggggtcaatcagcagcaagagcatcgagtcggatgggaagcctccaagcggcttccagttctacactcacgcatccggtcgattcccagtctatttgctatctaatagacaagctcaagccgagacggagaagcacaaagaagcgcagcaagcgccgaatcaacagcagcagcacttagcccccaatggcttcgtggttgtcgacccttctaccggcgtcgatgaagaaagctccaccaggcacgctctgctcaagcggcaatcgtcgtccctactctctctgcaggttttacccccaccaacaccgcccacgccgttcaccgagggcgagattcagctggtactgcaatacctcaacgcgaacttcctgcggacgcctgtggttcggttcccagagggcttcgcagacaacgccggctgtccgttgtacgagctgctcgacatgatctgcatcaagaagcctggagggctggctgtgcctacgcttcgcggacctggcgccgcgaatgcccctaccaagagaaagaacgccgatactacgaacgcttcaggtgctaacgctaaggccaccggagctgctggatccagttcaaactcgaattcatcggcgccacagccgtccaagaaggaccagctcacgcagtacacgaaccagtacgtggagctgctgcgcttcctccgctcgtatggcgccatggtccacgacgtgctccccgagcaccttctcgcgcaagagttctacttacgcgcctgcgagagtcctcaggctgatcccgctctcctctcgtcgccttcgtacgccaccctcccgtttgtagcacgccgacgggcgctcaaaaacgaatggcgagcgctgagcactgccgcatggatgaaggtcatctaccaggtgatcaagtgcttcttgctctctcgtatcacgtggaagggctaccagatgcagcaacaaggtggggcggagacttctgctggagacgtcagcgcacgcagtgataccaagcgcaaaggtgagaagcctccagtctccacaggccgcgcatgtcaaggtagcaacgtctacagcgaggcggagatggtgctaatccagtggctttgcgatcgagttcgctcgctacacaagccccaacaacccgctgtggctccgatggcctcgttaggtggtgcgctactcgagactcagctcctggatatcgggcgtgacttgagagacggacgatggcttttccacctcgtggctgcccacatcccgacgctatcggtggaccagagtgcttatcactgcttccgatggatgcctgaggccttgagttcacggcctcggagaccgccttcagccgctcagttgcagcatcaagcggttgtattgctacaaactctgggggcgtttgggcttgacttcggcttggacgcagcgagattcctacggcgatataccggtcgtgagatgttgttgctgctgcttcacttgcagcagacgctgcctcagtttatccccaaggctacgatcgagttcaaaggaggactgggtcaggtgatggagaagagtattgaactcaagaacccaagcgcgcgaccgctgcgttaccacgtctttctggacggagtggagaggaattcatccggtccgagtggcgtaggagctgctagtggcggcgcggactccgctgcggctagcgagtttacgatcgagtcgaatgagctcgtgcttgatcctggcaaaaccgtggcgtttgtagtgactttccgtccgcggttctcgaggaaagtgacagctcgtctggtcttccaagcggttcgtggggatatcgctggaacgacgtcaatcggcggaggtggagccacgatggtcttcttgctagaatccaacattgtgtcgcgcaaacctgtgcgaatcattcaactcgagacgaagacgtacgagaagcgcgtggaggagatcatgatcgagaaccagtttccggctaatgccaacttcaagctgtccatgacgcagcagcagcagcagacgcctccatcaggggcggacactgttgtgaatggaatgaccgactcaggttctagtgctacgactacgggtgtcttgccctcttcacgaggtgggagtcgtcgacaaacggtgcgagccccagcagcagcttcacagacggggaatagtacagccagctttgggatggggtcggacatcgcggcgttcggcagcaagaagcagtttggcactgcaggcaggaaccgcggagaggatgcagactcagcgtggtgtatctgtgcccagcagcccttctacctcccagactttggcacgtctggaagcagcggcaacagcaacgggggcggtgacgacgcggagggtggcggtggattgtccgttccagcgtctggactcagtggcgcgtctgtatcaatccggaagagcggctctgcgaaggtcaagctcgagttcttacctctcgtgcccgggaactaccgatgtcagctgctcttcttggacgaaaacatcggcgagttcctgtacgaagtccacgcggtcgcaagtctgcctgcaagtctggagacgctggagctgcagtgtgaagcgtcaactgcagcgagtggagctgctggcgcggcggcggcgcggttccgtttcgtgagagagctgacgatccccgtcaagaacccgctattgaatcgcgcactcacagtctttgtcgagcgagctaacggccatctacggacgaagctcaaggacggactgaagcgctgcgaagagaaccaccacacgagcttccaggtggacttcaattcgccgtacttcactgccaatgtcccggagttgacgcttaccaatggttcaggcaagccacttccagcttcaggtagatctgatggatctgggatcgattcctcgggtcctaaagtcccgctcaaggccaaccaagctcggctcgggactcctcgctccgtttccgccggtgccaacagcgtcttgatcgacttccaaccaaaaggagctgggcgatacgcctgtaaattgctgcttcgctctcgaaacaccacgtgcgggagcagcgacttgcgtgtgtacgaccttatcgccaaggtgaaggagcccaacgtgaagacgcaactggagttcgtggcgccagctcgccacagcatcgtacaggagatcccgctctccaacccgacggatacgacgtggtcgctcaaggcgatcttcagcaacggcagcactgatagcaatggcagtgggaagcctctcgcgtcaatgttctccggtccaccgtctctcgtggtgcctgcgaagcgatcggctacgtatccactgaccttcacgccgtcgtggatttatcacgagactcggacgtttgtgctgttgaatacggccacgcagcagcagttcgagtttgaattgagcggctacggagaggaaccgctcgcccaggaccacgttgctctcaactgccaagctcgctccagtatcgtgcacaacttcgacgtcttcgcgctcccaggcggcgagccaaatgcagcgcaggttttcaaggtggagtcagacctgcgcgatgtcgtcggagcgtcaacactcaccgtaccagcaggtactggcggctcgaaccgcgtggtcaagtatccactcaccttcagtccgctagtgagcggctcgtactttggctccgttacgttcacgaacgaagccacgaatgagtatctctggtacactgttgaggcgtccgtcagtcctccagaacccgagacaacgctcgagatgcgtgcaactgtacgtggcgcagtgggtgtcgagatcggcttggccaaccctttggataatgagaccacattcgcggttgagctgcgtggtctgggccttctggggccttcgaccttcacgctggaagctcgtcagtcgggcgtctacgagttggtctactcgcctctgcttatgacgaccgggagcggggaggaaggcgccattctgttctctagtgacgcagtggggcagttctggtaccgattgaacctcgtagcagagcctgcagcagcccaagagctggatgacatgtcgtgtgcggtcggagacgtctgcacgcagccgctttggctgcagaaccccagtaaccaagaacttcagctgcagtatcgtatcacgaacacgaggaacttctccatcaagggctccaacgcctccgccaacgccgtcaaaacgccaacacgcgtgctactgcctcccttcggtcgtgccagcgtcgtcgtggagtacacgccgtcctccttgtccgactttgagagcaccagcatcatcttctacgagaaagacgtcgtgagcgactgggagttcacgatccgtggacgggggcgagcgccgagtgtcatgaagccgctcgtagtcaccgctcgagtcaatgaagctgcgtcgacgctgttcacgttcaagaacccgttcgccggaccacttcgcgttgacgtgaagctcgttgacgacgatcccgacgggaacgggtcgccgccttcaccgcgtggtgcgtcgcccgtattcgatatgctgctcaagaaacgccgagtactgctcgagagctttggccttctccaggtgccgatctccttcctgcctcgatctgtgagtgagacacgagcagagctggtagtccatggaggagacgactacgcggagctggagtggcgatatcccctacgaggagtggctgaagcgccgatccaccctcgagtgctggctgtgctagcttgccaagcgcgtgactcggtcgagaagcgtgtcgagtgcgagctactcgcagctccggatgacatggtgccttcggacgagacgttctcggtcgagtgggagattgatgccggtcgcttcggccccatggcgacaccagcggcgatcgagcgtgccttgactgtgacaccttggccggtgtcatccagctcgagatcgactgtgagtcttccctacgtcatacgctttgagcctctgcgtccttatcgaggatcagtcgcgttgttggtgaaaaagagcagcgggggcctatggcgttttgatgtggcgctggatgcaggagatcctcctgttgacgacgtgttgactatcgagtcgagcctgaaccagacttcgtccgtcagcttccaactgcgtaaccagttccgacaaccggcggccttcctggctgaattctcagccggctcttcgagtgcgttcacggtgtaccccgctgagggggagctgtccccgtacggcagcgaagatggtgcggtattcgtggtatcgttcacgcctactggctatggcaagatgcagtcggggcagctcgtgatctgcacggaggagatgcagtggacgttcaacgtcaagggaacgtatcccgatgctacacctggcagtcgagctagtggaccggcgagtagtttgagtctgagctcgagtgcgtcgagagcgcgactcggaatcactaatagcagcagcggatcgggtagcaacagcgagcaacgagtagagcgagctaaaggacgtaggaacagatagtagggatcggatagtgatcatcattgaatacagacaggcagactacataatgtcgtacttgcttacttatcctggtagtgcttcggttacgaagtatggacagcccaaccaggattaattcgatgcacctgatatgaggcgcacatgaagtaaaagtatactgaaatcaagtaaagtcagttaataatttcagaaatcgcatggtttcttgaaattcacggaaaagtagaggtcttttcggtggagtggcaaactagttgagtaggatattcgtttccagagattaagggtaaacgttaagtacgacggtgccagctctgaattgtttggatgaaggaggactcctccgagagggtctttgccgatagcagaatgctcggtgttctagttggtatgcaagtggtttgtgcagcgatatttgatctatctactaaagtgcggagggtgttcggagcgctcctaccaagatagaataatgctaaattcagcactgtgcgcctacgatagcatgagcgatggcgagatgatgaagcgaggctcggtaggtagcgcggcgatgtacaggtggtgatagttccgatgcggtgcgagtccagctagttcggcgccacagcagcggagttttttaccgtgagcacggtggggggggttggctgctgcggcgaccgaaaaagctgaactgaggacgagcccagctcttttagattgtggtcgttttgcttctttgtcttcaaggaaggatccgtacgtagtctagatcaatcacagaaattttctgcggatcatcgtacctagtccaaatcactcagtgcaaaatcccaaaggaaaggtccgtagtcttaatcgctcaccattttccgaaaatgttttggaaccatctacagaattctgcccgaataaggaacgggtgtataactaatagcctcacatatttaatattattttccagtcgatgtggcgatagggggatgtgcaaggtactgcaaggtactgaggtgaaaaatccagtgccaatctccaccttcgtttgaaaaatggcgcgcatttagcgatcttactagacttcaaactacttgtaccgtagtggtagacttgcactttttcttttgcacctcgccccacaagcccacctcctcccccactccacccatgaagtccacaccgtccaagcgtctccgcctcacttggtctgagaaagtgggcatcctcgacaaggtgaagggttagataatccctacgaggtcgaccagttgacagcgcggttgtggtgcgagcagctgcttttcagttcattttgaaataactaaatcagtacattggaaaagtatactcaacttaacatcaatttatatattctgcgtctttatatatatcaggcgttccttactcgagtagattactgtaggataaggaagctttctcccaacttggcattccttgcgcttctctgtcattgcatctatccaatcaggacaagttcttcaatgaatttagccaatcacgatcgattcgtgtgtatcccaacattttcccaattattttgggaatttacagtcttgctagaataatatccaatacaaaagtttagtgtaattgttgcattactcatatttgaccgcaaattcccaatacaaatcatgattgtatcgttggtggctgtgactcgtctgctttctctcctctcccatttgaaaagatgcagcgagcgccgagagggcttgacatcccgcaagggacagcagggcaggaggcagcggcgatgaagtgcttcagcgaattcttagctcttgctaacatgaatgaggagtcaattgctagtattgcgaagtcgctgtctattcctgatgctctaccaagtcaaaacttttactctttgctaaccgccttctccattttcttgcaaactaagccaagtgctcgaggaggccgtcttgctaaggctactgctgtgggctatatgtcccaagttgtgaacctgctccgagagcggtaccctctgtacttgtcagacagcaagcgaattgcgaaaatacgcgacaaaatgggttcaactattgaggagcgaaatttgctagctggcgtgcagactggtgaagctccaggctgcacgctcggcgacttgcgtgttctggtgcaggaaactgcgattaagggggttggctcaggttataagagcttacatgacgctgctgtactaacgttaatgtggcacacgtttggtcgagcgatcgatacctgttttgctaggaagagccagctatctatggcggcatcgggggagctctttctgcatctagctcgaatcaagacttcggtggttcaaggcatctcaatttacaaggccgcgactcactgggagcagtgtatgctgcacggcctcggaatgctgttcgtcggagcgtcggagccttccagctatgtgttcccgctagtgccgcacgcggcggcatcggatttgccaggggagaagacctacagccaagacgaagctatactctactgggagaaccttgaagagaaagctgaaccaaggaacgagccaccaacaaagcgcgtgagaggaaggcccaacgtgtccaagtatattaacgacgtcatcaccatggtctgcgagcgccaagcccaggcctctgccccgctgcccccgacgctcaccgcagggttgagcagccaccccttgcgccgcggctccgcagcgtatgcaaacgcctcaccgcagcttgcgatccagtggatctcgacccggggagcttggctgctagactcgctcacgaaggcgttcgcgtacgtgggtaccacgacacgcgaggaccagagtgtcggcaaagtcctcgctggataccgagacccgcacctgccatgcgtcacgcccaggattgccaccttgagcgagcttcttcctgcgctcgagtacgcccagctgctaaccctgcgcggccagctcttcaagaacgtcagcggcttcacggacaccacgctcaacgttgacgccttagtcctggatgcggcgctcgcgtccctgctcatccatcttgacgacgtcgcgacggcagtccagcaggagcaggctgccacaggcttcacatcgcattacctgtaccgcttccacgaagctctggacgcaaccaacgtagcgctgggagctcggctctcgctggacacgtgcattggttggggtcggcagcttcgcacggcttggcaaacggagaacttcggacagctgggtgaacgcagcaatggaaacaccaccatacttgccgcagccgtcacccagatgctatcgtccatcgcagcaatgcagcgcacacttcagaagctcgtcgcggcccacgagagcaaggccaccagcgctgacggtcctgctccttgtcgctgtgctggccaggccccgcaggcgagcactgacaccgtcgttgaagcgcactctcttgctggctgcttctacaactggtacacacaggagctgtggcacacggcaacccaaaagaaacaacagtttgttcgcgctgacctcaaggcaggcgtcaacatcatgatcatagcagcagggcgagaggtagacgtaccaacggcgccactggaccgggaacggcgtcgcgtatcggctgtggaagcagcgtgtctggacgctagcggaagacttggacaagaaggtcaacgctgcgcttgggagtatcgacggtaaaggccgatccaaaaccgcggggtcgctacggaagcgctggagaaagctgcgcgctgaccaccgctctgcgtacgacgcgctctgctcagcatttatcgcccgcaaagcgaacggtggcatcgtcgaccgctgcacaccagctagtcaccaatggaagcaaaaagacttggagtcgtaggatcacgcagcttgtattaactcttaatacattcctattcatacaacatggataatcgaattcaaggcgcaaatgcacacgtcatcgccatcccacaacttaagcacagcgcatggattcccgtcagtcccgatacaaagtcatacacaatagaaaaacgctcacataccgtcagcgagcgcgcacgacctcgtgcttggccgacagctaccaaaaccggcagcataacacccgccctgccgggttttgtagctgctttcgacgggtccttgcgtggggcgcgtggggcgcgcctgggggcactcgggtctggggtggtcggcgggggaggcgtgcggcacgctcggagcgcgctgtcgtgttggagatgcggggcggaaagtgtgaaggcggagaaggctgcgcagttggccaaaaataaaaccttaaggttttttcttggctttggagccgataaaccagtccatactttgttgaatctcacttatgattggctctcctcattgggagcggcgtttgggacctggtcgattaatgtattgtagtcaaaatcactcgatatgaactgacacgaagtaagtttttggactgtatgaggaaatatatcgattttttatctgaaaggttataccgcttcgtcccagtcaacagaatcaacaacccgttcgcctgttcaagtacacggcaagtttgacagctcggtggagaccaacgacggcggtctggtggtgaacagcacgtgttcgcggcgcgcagcccgtcgcccgtgggacaacgtcggcgccacgtatgtgtgcgagtcgacgggcgcgttcgtgacgacggacaaggcccacgcccacttcgagggcggctgctagaaggcggtgaactcggagcggcccaagaactccacgcccatctacatgatgggcgtgaaccacaaggagtacgatggatcggcgcccgtggtgtggaacgcgtcgtgtacgaggtgatcaacgaccagttaggctcgaagaggatgcttctcgtggtgatgttggtgctggtgccaccgttcgtgctgggggcttcggaggtggcgctggcggtcttggcggagcgggcggcctcagtggtgtcgactttcgaagccggccagtcaagagtgccagcatcgtgaaaaaccactgcgccagccgcgcttctcgaaagcgtccctgtggtgcgcctcatgaacatagtgcgctgcattgcaaagtgccagtcactacggcaagctcttaaccaagatcaacgcggatgcgtgcaagtatactccaaataatactttcaaatactttcagcactttgagtcgtcgttgtgagcgtgccgactaatgaagtgcattcgcgggcaggcaggactgaagtgcttgaaatatgcactaccagcccaaacctctagttgtcatcttgaattgtgcccagatcatcaagtccttctcacaaccggtgacgggttctgttgacagcaagagaaatatcctaatcccacgatcgagtatcacagcgagcatcatggcttagtccgacgctaccaaatatgcatggatgtcttgacgtctcatgctgacaaagcctcactacatcaccagcgttgtgaaataagttacaacagtagtcacccttcgccagcgacttcagcgcatatcctgtatatcgctacaagccttcctgcttgctcgagatgacgctaccttccggagtgatccgagcgttatcaaatactgcagccaccttgtcgagggccccaagtaatttcagcagcggcgtcaccatgtccatcttggactccaaacgcaccacccggccgctcgtttcgtcccagtcgaagcgcaccgttccttgtatcaccaaacgcttattcagcaacatcccagccagtgaaaaccgaccacgagcttctgtctccaggaggtgcggatacaaagcgcgaactgtgtgatcggtaatggtaattctcgtcgaagtcgttgccaggaccgactcgtcgctgaccaactggaccgtttgagctgcacactcacgtcactatgatgaagcgagaagagcctccacatctcgagaatggcctcgaccccgcatgcatccccgtccgtcacatccagcgccatcgtctctttaagaaaggtaagctgtgcgtgaatttcctttgggtggtgaacctccgcctcgaaagacgataggtccgacactagcagcggcatcatgtagccgcgagagaagagtcggaagtactcggtcgccacgacccagaggctcgggtttgtcgggatgcgggccaaaatgaccccgcgctggtcttcgagatctttgatcgcttctttgagttcactgatgctggcttcgagctcgtccgcgtgctcccactgtctctgcctgtacttggcctggttgacccggcaccgctcgcgcctcgaagccgagaccttcatcttgcgcgcgggggtcaccggtctcgtttcttgcgcttgctctgtgtcgtcgcggactcgaagacgcttgtggttctggaagctcctgtcatttattggtgcgcgctgaccgtgaagtggaactactcgttggaggacgccaccgacgatgctgtcgctgagcgagctgctgttaggcggaacgagggagctctcggccattttgtcatctcagagggtggagttggcgtgtggccagtcgttgtagcgcgacctctgagtaacacggatcgtcaacaaccatagcgtgacttgagcagttgtgggaggacagtttttatcatagacttggagtgggggcagccacttgcagcgaggttgagcggtgctgtatgtagttagcttaagaccttgtattttttggaaataaagaccgaatgaccatgttaagctggctatttgggccttcgtagtactaacgagtccttcgagatcaggccagtgcgcctgaaagcatctgtggcaaatgcatagtttggccgcactcgtacaggcggagactcaggcagcaccgcaacgaggtcaccgtgctcagtgtggagctacgtgcctgtgctacagctatagcggtactgacagtgaacgcgctcgcgctcacttgtcggtctacctttgcaagccattcgctcagtttacattcagtttttgtgtatgcatggatttactggtcttgatactaactttaatgagatcttacataggagcaaacgtcctacctcaaatcggagggcgttttgccagaaaggcacaataagtcgcaggggttcttaatcaaatttttttgctactgaaaccaacccagaagcctgcaattacgttcaccgaacgaatattgtggtttgcatttgatttggcaaaacaggtcccctgaaatcggatttcgggggtccgattggtacaggcggtccaatttacaaatattttggggttgatttaatgtgagtgaggccggaaataaaacccaccatcccgttttgccgcttaatcgcgccaaaatgactggacgatgggtttgcccgtcatcatgcagcggcgtggtcttttgcacatttcccaaaaaggcatgacttaccacgacgatttccgctggcgagcggtagcacttattcatgtgtacgacgtcccgataacgcacgtttctgagcttctagagccaaggccgaggacgattcgcagctggtacagcctctttcttcgccacggcatcgtcaacgacaaggaagagcacaaccgccgtcagctctggccggacgacgtgctacaagcagtgaaactttacgttcaagaccaccctactttctacatcgaagagttccgcgaccacatagtgctgctcttcccggagctgcccaacgtatcaacatcgacaatttgccgcgtgctgaactttgacctgagtttgagtcggaaagtgctgtcaaaagcggcacgggaagcggtgcctgctgaaatcgaggtgttctacactaagttgcggcatatttattcatttgctgagcagctcgtctttctcgacgaaacggctaaggatggacgccacgcttactgccgatacggttggtcacggcgcaacaccaaggacgtcgtgaggttgccgttttgccgaggaaaaagactgtcgataatggcggcgctgaatgtgaacggcttatttgcgttggattggacagagggcacgttttccagagggcgtttatcaagcgagtcgtgccacacttgaacccgtggccgcttccgcgttcgatcgtcatcatggataacgcgaaaatgcatgcctaccctgagttggaggcggctgtgcatgcctgtggcgcccgactgctatttctcccaccctattgcccgcagctcaacccaattgaaccatgcttcggactcctgaaacgatggcttcaaaaggacgcgaaccttgtttttccgctgtacccggaaatggtccttgatgcggccatgaaactgtccacacggtacgatgaaaatggttgtcacggcacatttcagcactgcgggtatcttggcgcttcattaagagacgaaacgttcaatgcattgaaggagctgtaggatagctaaagaacactaaacatctacgttaccgcgtttgccgcctcatgggtcaagcgctgcactcgggccctctggatccttgctacagtagcacgatgaaactgaccgggggctgtgtcgtgctccgaacatacagaaacaccttgaagcaaaatgcgctgcttaccagtctctcactgggctgcagcaatctccagcggtgctgaagtgttgagcagaaattgtccccagacagccgcacgtacttggattgtccatcattatttgcacgcttgagatatatatcgctgttgccgtgctgctcgatgcgtttcttggctgtctccgggcttgcagccagctctgcaaacttcaccaagcacatctcgcggaatacagcgtagccttcttcacggtcgaacgtaatctctgcgccatcctccacgcgaatacccgagcggctctccaactcgaacgactagtgtcgcatccaacacacggggcggcgaagtccgatcgtcgtgactggctgtagtggcgtggggtgtatgaatctgcacaattgagctcgaagttgctgagtgtactcgtcagcaacacgtgcgttggcgcagcgctccagcaactcaaggctttgtcttcgcgttggcgcaacctaaatagccgaagctgttgaccacacgcagaccacagcacagcaaacacagcacagcaaacacaacaccacaacagaacgcacgcctctcagcaacgcaaaagacaacgcgaatgtttgaatggaggctcaagtctcttgcttgtattagcgttagcctaaaaacgaatagcgactcgcaacagtatagtttgtagcataattagcatcagaaagcactgcaacatggaagaggcgcataccctacccagatcagtaggcgtgtgcacagtgagggggccagtctcgacttcggctgcagaggcggaactcggtctctctccgcttcgctggatctggtagacaagccacaggcaatatgttagcaagttgcagctgtacgaggagaacgtagggatgcttcttaccgccgggaacgggagtggggagagagagagaggggggggggggcgctcagcacgcgaagccgcagggagccgccttgtcttgttgtctgtcgggtttgcttctgaggtaagaggcggttggatatagtccactttagctggagagagggggcaaaatctgctcaggaataggcacactgaacccttgcccaacgacgatttacataaaagcagggaccgatatacgactccaaatcggagggcaaaacaactgcaaaccacaatgaatcaaataaatatttctggcggccttttgggtggtcggcacccaccttaactatcgagtatcgtacaccgtgtttttagtgagctgggcctttcagtcacgctttgtactaaactttgtatggtaggatcaaaatgggatgggcaatgtacctacaatagaagcccctgtgtgtaccacactagagaccaccatctcgcttcgctcggcgggagctcacgtgctcggcataaacctgtttcaaagagacccccttgcggggctccgctcggcttcaatgtcaatgtcaatgtattgcgtgtttcgcgtaacccaaaaacactaagctagactctatactgctagtcgaagcgtaaaatgagtgagataactggtactgtacccacaaatgggtacggtgtaccagcgtacctttttccgcatacgccaggaaatgtgaggctctccgtgctccccctccctcctcctcgtccttagcgaaaatggagctcgctgcgtcgctctccttctgggtctcttcgtcaacgtctggtagttgtaggtcctgccgccgatcgatgtcctcagccgtccgcgccttgatctgtagtatctgttctgctccttgcacgtcttgctcatcggtccttagcatgtccagcgtagccttgcgccttgatctgtagtatctgttcttgtgccttgcgctcctcccaccgaatcctccgcccgccgtcgtgttgatggccgagttccagtcgggagtccgccccacgccttggccttctcgcgcgtccagttcatctttctgggccatgccgttaacagcccgcccactgcggcggacccggtcatagcgcgcagcgaagccttctgcgcggcgagtccttggccacagcttgctgccacctcaccaccttgcccacagagacgtccccacagttcccgcaagggactagacgctgtccgaaggcagcgcccgcagagcgacgccgaggctcagctcggcgccgtctaccgggagggcatcactccaacccgaccaaaaaacgccggcttgtgttctaaaatgttcgttggtgaagatggagctactgctcggacaacgttatcgatgcgatcgggttattctagaagaagattggtatacatattagtgctaatttgcttgttataacatagtgtaagtaatacaaagtgtactattgtgctttgcagttattttgccgaccattttagacgctaaatatggcaaagcctgctcctaaatatgtgtgaaagaagatacacgacctgctaaaattatgcataaatccacctcctcatatatatatcgacttgggagggcctgtgtattggcccagtacaccaccgtccatgatccccagcacatccaccctcttatgcataattgccgtgtgtgtaggtgcttgtggataaaaaccgacagaattacagctgcacagccacaattgcacattcaaaagcgcaattgtggcgcttttagcgtaattctaggcgtccacccatttatgcacctcgatttatcgtaaatctagcaggtggtcgttataaatacagcaaatctcgcctcgtattgccaaaatcattgcaaagcacaatactaaaagactaactgatagtttggtggttgtggcagcagcgtggtattgctatgagcgttttggctgggggtagaacttatcgcagggctacggctagaatatgcggcgactacgctgatggctgcgacgtagtccactcttcgccttcgccgatataccttttttggatcaaccgcgggacaggccaactttggatcaacttttgtctcgcgatggatcaacgtttgggacaactttcttttttatcaatttttggttaaatatattactatttgtgtgggtatcggcctgatattggatcagacgtatctgtagtgcgtctgggacggcgtttctgtcagatcccatgcgtatcaaccttatcctaaatatagcaatacagacataaacttatcgctaatgttagattgttttttttgcttttggttaatagtctggtatctctagagcgtccgaactcgaggttttcacagatcccatgcgtaaaaatcttatccataaatttagcagtacaaatgtactcttatcgctagtgttaggttggtattgtgcatccagttggtgtcctggcacttcctggaggtcattcgcataattcccatcaaccaacgacgacctgccttatcgacaaccgactaaggattttctaagaccaaggtcatcctcctcacaggcatctggggacactaagccgttcccttcgagcgagtcaagcgacatgggtgagctgttcgaagtcggagaacaagatggtggtgcagaagaggccggcagtgaagagcaagagacggagttagaagatgaagagacgaagacagaggaagccggtcgcgtcagaaccgggcctatcgtctacaacggattctaccatgcgcgatatcacgactccgcaagatcaacaaactatcggtgcagctcccacaagcggaccaagtgcaaggccaaggtgtaccatcgcgctgacgggaccataattcagagaggagagcacaagcccggctgcaatcgcgaaattacgagggacattccaagcgaacgacctccgtcagcacctgttctcactgccgacattctggaggcgatcgacgaacttacgcttgagcagccaacgctcagtccacaggaagtgtgggaccacatccgcaaagagttcttccaaagcccgggcaggattacaagcggtttatccaaaaaccaggtaacaggccggttctaccgaacgaagttgaaaagcttcggcaatgatgtgtttgtccaaatcaagatggacccactgtgcagcgtgcgagaaaaccccagtctgaagttcttccagtatcaaggctcctactacgagggcgaggccctgcaccacttcattttgtgggggaaccctgctttgttggaccgattgagggctcggcaaacttcgcttttcgttgacgggacattccgctgtgtgcccgcaaacgtttaccagctggtagtcgtgatggtgtacgacacactctcgaatctgtacattccaagctgctacgcgctgactacgggggaaaccaccaaggtgtacgactacgtcttgtatcacaccaacgcctgttgtgactttgcaatggaccctgcattcatcacgtgcgactttgaacaagctctgatgaacgctgtcaaacatcagtttccccgggccaaactcatcggctgtctttttcacttcaagcaagctctgcgccgaaagatgctcaagctcggaatcgctgaacgcgaagtctatattgcaatcgaagaaggggcgatggattagctgactacaatccgccaatttgaaattgtgcgctctggaattcgcaatatgcagtgctcaattcggggggaatgccaagaccaaggcatcgcgtactcaactgaagcttgggccaagttctggaaatatttcgtccgcacctggattaaaaagtacaagcccgaagactggaacgtgtacggtgtgcaagaggacatcgtgaatcggactaataatccgttggaacgctctaatcgaacattgaaccgcgctatgggggatccccacccggacatcggcaaatttatcgttgtattggaggcagaggctcaacggtacgtcgacgcgttgtcggatgtggccaaccgtagggtgcgcacacctcgtcgagtccggcccagacttacttctagcgcagtggagacggccgaagacagtccaagcgaagttggtgactcggtttctgaggcgtcgatgtcctcggagtactaactcttgtcacttgcccaaagtacatgcacagaacaaaccctcactgcatagctttaattgaaatttgccttacatttacaatacatttggttacttcgagatctatgacacttttccacgaccgtaattgagtatagagttgtttgtcagcatcaaattcgcgattaagacacgagattcagacatgttttggcaaaattcagcacgtcgctggctcagttcagcatctgtttggtcaaaaatgttaggggaaaacgtctttattgtggttagaaacgaatctaattcgaccaggttagaaacctacttctctaatcatagaaagcgtcaactgcgcgccagtccatgtagtagtgaacatggacaatgatgggaccgataatggacggggcagtacccaacgattcaacggccgtggtcgagcgacgtgtcgaccgtcgtggaggcggcgtctgggttggtgtagggccgtcgaatggtgggagggggccttgatactcgtgcagacggccgaggcgcttgagatagtcgtagcggtttcggtaggctttcttttgtttagctagctcctcgcgttgcttaacaaactgcttgccacacgcaaacaccatcttctggtggcgcttcatgttgccatgagtggcgaaacgcttcttgcacttgggccaggtcttggagcggcgcggcattttcccagaatggtgttcagtaaaaatattatttttgaaaatataacataaaattatgaaggcaacaacactacgagagggatcaacttttggatcaaacttgacctaggatttatataatgtgcaaggaattagcttaattcgtcacttaaaatgctgatccaaaagttggcctgtcccgtggttgatccaaaaaaaaatctccccttcgcctcatcacgtaataaactactatattggattgtaatatgatctctataaaaaccaatagtcttatttacgatagaagcttcatattgaagcttctatttgacagacgtattgcgattgccgattgtttggttgcgagaaagcacctccacgcgtagagggcaccatgagaaatggccaaaaactaaatatgaaggcttagatcgagtgcagtagtactttacatattaagtgctaatatcatttataatactgtggtacaaacataactggcctgctgtactatccaacaagacgaacattttgctactacctaagaaaaacctcgatacagacaacgacgatgaaatccgccattcctcccatgtcgttcaaccaatcgtatcagcggatctgtatattttgtgtaaaacgcgcattttccacgtaatatatgcactttagcgtgtacattttacacttttatccatactcaagaccctgatcggccaatggaaatacactcgaaatccttaaagattagcattatactggaggatagtgttcagatagcggctgtactatcgtatttgaccaaacaagcaactgctattcgtcgcgcagcatttgatagtcgttgctcaatgcaacggccgtgactctttcttccggcgtgatcagggcgttatcaaactcgacagccacgctttcaaggttacccaccatatccaccttggactccatccgcactactcggccgctagcttcatcccagtcaccatgataaggcgaccagaggttccacttcttgaaaatcgactcagccccacgagcaccccgtccgtcaccatggtccgtttgaggaagttaacatgtatgcaggatgggctgtcgaaggctcagcagctcatggatctcttccttcaactgctgagcgttggtgtcgagttcttctgcgtacagcctctttttggtcctgtacctagcctggttgactctgcatcgttctcgtcttgctgcagagacctttatcttacgccgtgggaaagcttccgcttgcttcgcgttcgtgtggctcaaggttcctcatctggccaatcgtggccaacaatggtgctgtcgtcgtcgatccgctcacgaagggaaactatacgctgcacgacaccgccgatcacttggtcacccagtgaatttctgttgggtggaaagaggaagctgctgcccatggttgacttgactcgaggggggcttggcttatacaggacgcggcgacttggagaatgacaactcagaacccacgaattacgcacatctcgtagttccattcaagctgcgagtaattgtgtccgagccatcttgcccgatagcgtaagccataccactgaaaacttgtaagggtccgaacgaagcttcacgtcaacaaaaataacagtcagtggcaagcttcatgccgctacgctcttcgtacggatgtgccgctgcgctcttcgtacagatgtgtagatctccgtattctgcatgcaatccatcatttgcggctgctctgagcctaatatttgtgccttgtttgcaccccagttatcctttagtcaccagagatcgcatgtcgatgtcctctaaagccagaggcccagcaacaccaacatgtttgcagcagtaaccgctgaagttccaatacgagggctaaatgaacaacggagctgaaatattcacaagcgtatagtttaattgttgtcgttagcgttcactgtacactaaacctgccctcgggggtcatcagagccctctcgaagacaatagcaacgttctcgagactgcccagtagcttcagcatcggcgtcagtgcgtccaccttggactccacccgcaccactcggccgctagcgttgtcccagtggaagtgcaccgttccacgcataaccagccgctggcccagcagcttcgcggcaagtgccgggtgctcgatgcccaggtgcgggtacacatggcgcagcgtattcttggtgatggtgacgctggtcttggtcacagcgctgagcgattcttctcgcttttgctccagccgctggagctggaagtgcacatcgttgtggtagagcgagaggagcctccagttttccagcaacgcctccgcgccacacgcgacgccatcggttacgtcttccgccatgctctccttcaggaactcgagctgcacgtttgactgcttcaacgccgtcgagttctgggtcttgttggtcttgctcagcaccgatgcagacttggactcgggcaccatcaagggcgccatgaacccgtagcggaagaggcggaagtactcggtggccacgacccacacgctctcgttcgtgggggcgcagcgcagaatgtcctgccgctgggactcgaggtcctggatctcctcctgcacctgtcggatgctctgatcgagctcctcctcgtgctgccgctgcctctgcctgtatctggcctggttgatgcggcagcgctcgcgtcgagaagcagagaccttcatcttgcgctcagccggcggccgcagctcctcctctacggcgtacgagtccctgctgcgctttgctaccatcgtcgggagggagtcgagttggggcaagcgcttgtggccactacatgtataggtccttggctcttgctgctgagcggtcggcggttcgaactgggcgtgcgcttgcctcggtctgttgtagccgacgcgctgcatgacgccgccgatgacgttgtcaccgagtgaatagttgctgggcggacaaaggaagctgctggccatggctgactgtgtgtctgtgtgtcttgcttgctgtgtgcccttggagtcaaacaattcaattgtggaatgaacaacgcaagtctcacctcagcccacggaagacaccggcgccacagacgcgtgtaaagttgacgggtcatcagcgattacgtgcgaccagcgtgcgaccagcgttgtaaacagcgatcgcgtgccaccatgctccacacggtccactgaatttcgagcaggaccctaccccacggcatcgcctattaatgggcggtcaaccgagataacgtgagcgcacgtttcagctgttctcagctgctggccaacgtcgtcgcaacaagttcaagcgagtggttggcattaccgtattgtacctacctattgcactgccagagccagaggagggaaggcttcagggagagccaacgagtaagggggcactatcctactactggtgtatacactactgcatgaacatacgcggcggccccacgccgctcccaagcattcatcttgttctgcggcaagacattgcgccctgaaccccattctacgaagcagcacgttatacttgcttaccgctgttcaaagaccctgcaaggagcgtttggaacgatgtgtggagagagcgatatacggcatcactgatgacgggctgtacctgcatgtgtcccacgacggcgacgtaagacgccgctagagattgaaaacaacaatgcaacactcaaaacttgccaaaatgaagctttttctatgttttactcgagttaacatttcctgtaaaaaaattttaggcacaatactatacatgggtatttgttatcttctcggttactgaacgattcgacactctaaggttatcgaagtttgaccaaacacacacgcgacagcctccaaactgcccagcagcttcaacatcggtgtcagcatatcgagcttcgactcgagtctcgaaacgcgcccactcgtactgtcccaatcaaagcgcacagaccctggcaccactagacgttggttcagcattctcgacgcgagaggagaccattcttggccgttggctccgaccctgatcaggtgcgggtacaggtgcaggaccgtgttttgaatgatagtgagggtgaccgaggtggcagccagcagcgagccaccggatagctgctccagacttgtgagctggacttgtaggtcgccgtgcagaagagtgaagagtctccagttctccagcaacgcctccgcaccacaaagacaaccgtcggtcacgtcctcagccatggccgtccgcaggaattccagttgacggtgcggctcatatggttgtgaggcaaacggcgagttcgccacactcggaggggccgcggtgaatccatgtcggaagtgtcggaagtagtccgtcgctacaacccacacgctctgcgtggatgaggtggcctgctcgatgatctgtcgctcggcttggaggtcttcaatctccttctgcagctgctggatgctctcatcgagttcgtcggcgtgctggcgctgccgttttctgtatctggcctggttgatgcggcaccgctctcggcgagaagctgcagcatttggcttggattcggtcgcttctgcttcgatagcctccgccttgatcggtattgaactgaaagcgctttcgcagtcaaatcgcgcgactgttcgaagtggcgggagtcgcttgagactgaagaagctgccgtcattgtcaaactgaccgtgtagtggagccacgcgctggagtgcgacgccgtcagccagatttagagtattggggtgcggcatgaacgtgctagccattgaggacggggaggcagcttcaggtatgcgaggcaagtcggcgagtggcgagtctgcagtcactcagtgctcagacatttttcacactttcagcaatcggcgattacgtgccggccacgtcgtcaacagcgatcgcgtgcgctctgctaaggcttcgatgtgcaatcgtctagaagtttgtatggagcgagccctagaccaggacaaagacgggatcgttcacaggtcaatagcgataacgtgctgcgcacgtttcatgactcgccgtggcaaagcctcgctgcttattccatcatctgttgcgcgaccaggacgatcggttgtgtgcgtgcacattcgccttctgcgtttaacacagctgggctgaattgttggtcaaggttggcaggcaagcatgcaacctgagcgtacgaggtctagaagtttagaggcaaggatgccaagctacacttcatggtgtcatgatgaaatggtggtggggtgggggtgggggctactgtagtcagtatgcctacgatatagcggcacaatgcgtacaaatatgcacgccatccacaagtgtcaaatgcttggtgttgtggtcatcaacgatggcgtgcagcagaagtatagtgccttgcaaattttttggcaattccgatgctcagaagtaggatatatcgggtcggatataatttgcagctcagagataaagccgagggactccaggtggagatacgatttagcttgttaaacctcggtcgagctgcgcacgagggtagcatccgatatatcgggagggcggtcgcgctatatcggatacctcactcgttggggactctggtgctaccacacacacaccaggacaatattattgtaaggcgcatttgccgggccggtgccgctagcttcagctctggtttcggccgcgtctgttagacgttggtacccgcgagatcgtgccgtttacgacaagctagagaccaagtccaaacaacgccacatgctcccgcggacagtagagacgtatgcagaagaaagtcagataaatggacaaataccacacaatctcgtccaaagaactccctactgtgcattaaattaaaattgcgtcgctttctattgtacttgcttggcagatacagctacaagtaccttggcctggtcgcgtcggggccaggtccaccggccgctgcgtgtcgactgccaccccatcaagcccgcaaagcccacgtcactcttgtccgacaccttgttcgctctgcgcaccattccgggtgcgtttgtgctcgtagaccgatacctcctgcactagcgctcctggacacaagcttcttgttcgccgtcttggcgttacccagcagctcctcctagcggcgcaggcctcgtcgtggcgccgcagctcgaacagcagctttacgaaggccgccgcgccctacgcgacgctggccaagagcagcggcgacgacggcaacagcgagcttgacgatgcacttgaacaccttgaatgtccagtctgtctgctcgctctgcagcgccagcatctgctccagcgcctcgaaggccgccgcgcgctccgggggttcgctctccagccactgctcggccgagtagttggcgttctcgatgcgcacgtgcaggtccgcgggctcggcatcctccatgacctcgtccttgtcgcttagtcgaagtcatacttaccagacatacttaccgcgtagccctcagaaactgctttgccggtgacaagaacgcgcctacgtaaagctcaccgcgtcgtcgcatttaaagcatcctgtccctgtagcaatctgtagcaaacacacaagcagcagcagtgcttgtcggtagcatctagcagtaagcaggcaggttcagggagcttacaaagctgggtgcaatgagcgcagcgcaaatggatgctcgtgtgctcgcagccaacgaagtggtcggaattagataaacttggggggggggggggggggnnnnnnnnnnnnnnnnnnnnnnnnnnnnnnnnnnnnnnnnnnnnnnnnnnnnnnnnnnnnnnnnnnnnnnnnnnnnnnnnnnnnnnnnnnnnnnnnnnnnggggggggggggggcaaaacagcgactttgcctcatagttattcaaacctacccctacagagctcggatttatcttttccgacactatgatatccgaggtcaaaacgaagggcaaaataaatgcaaggcacagttcatgtagccaaagatggcgtgaagccagcgacaacatgatcacgacaacctaagaataaattaccaaatcgacacaccttttcaaacgctataaatggagtacatgtactgatccatgtgcaaaagcaatacgaaaaaaaaaacatgagccttagagctgatcgtacttaattattggccgttgatacagcccatgttttataaacgggttagggcaagtgtcatactaaaaacaagtaagaaatctcaaacctggtcaaacatggtcaaacatggccaaacatgttcggctcgtgggacgggtgtcatggcctgcaaacactatgcaattcctatgggctaaggtgatcttcggctgccaaacgtcgctttgccggcgctttaagccctctgaagaccgacccagcgttgaggaggaaataccatgactagccatggcactggggtgaagtttgcaggctcttcatgcctctcaaatgccgctggtgtcgatttcgcttggacgctcccgacagatttgggttcatttcacccccactgactaaaagcatgggctctatcttttccgttaattatttcttgccagatatgaatctgccctcgggtgtcagttgagcgttctcgaacacagtggctacgtcctccaagttgcccaggagctgtaacagaggcgagagcaggtcgagcttggattcgagtctgatgacacgaccacaagactcatcccagtcaaagcgcgaagatccgcgcactaccagtcgctgtttcaacagcttcttggcgatagtcgggttcaaaggggggaatacgtagcgcagcgtcttctctgtgatagttatgctgatcgacgagagagcaaggagggagtcgtcttcaatctgctccatccgcttgagttgcaggtgcacgtcgtcgaaaaccatagagaacagtctccagtgtcgtagcagcgcatccgggccagttgcatcaccgtccgtaacatccgatgccatcgtagccttcaggaagtctagctgtgcgtcggtctgctctggtggcgaactcgtgctccgtttctcggacgaagacgccactcccggcaccatcatgggcgccatgaatccatatcggaagaggcggaagtactccatcgccacgacccacgcgctctcgttcgtcggagcacagcgcaggatgctctgtcgccgcaactccagagcttggatttcctctcgcaaggcgttgagactagcgtcaagattttctgcgtactgtcgttgcctctgtctgtacctcgcctggttgatccgacaccgttcgcgtcgtgtagcagcggccttcactgctcgtccgtcatttgttggcggagtcactggttcttcctcttgcctgtatagcgtccttcctgctgtgagcttcgtcgacgtatcagcgagaggattcacgtccggaagacgcttgcggccgactaaacttgggctggattcggttgggtacgtctgtcttggcttcgtgtagcgctgcacctcgcgactgtcatgctcgtccgtcagaccgaggcggctgtgaagcggtccgctgttgtgcggtacggcaccgcgtcgatcactcagcaagtagctatcgcgcgggtacaaaaagctgctggacatggagctgtgctggtatgtagcctcactggcttgggctgtgcgaagcaaattggggaatgaccagcgacatccagtgcagctcgtagtcagcaaaactaagatactgtaggcggtgcgctcggttggttgttgccgtccacgatcacgtgccgatcgtcaacagggatcgcgtgctgaaatgcccggtttccggccaaaagtgcccagttgaacggggacgtgcaggtccaggtcctatctggaacacagcagcggcgcggtcaacagggataacgtgagctcacgtttcagctacatgcacgagaaaacccgaggcgggtaccctaccgtattgtactgggccccgggtacgtcgatacccaacttttccgattgaattggttttgtgttgagaattaaggaatctctggtacatgtcggtcaggctggttgcctttgacgaggagttcagatagaagtacgcagcttcgccttcaggatgaaaataattcaggagcttgcggatctccggatggggtacgctatcgttgatgacagcttgggcttagctcgccatctgtgattgccctgcaaaggttgcaactgaacagcgtgattgcggtcgtagcctacgactcgtaggaatccaggggcttggaaatcgtaaacttcgggtcacgcaagagatgtacaacattacacgtggattttttccactgaaaacgtgggcaagaatgcaaattggtgctcgcaaccgaatgcagtaataggcattgatactaaagagcatacgaagcaccccacaagtctttatggacatgttttgccgtcttctctgcagtaaaggtgcaaagcagatcgagagaaaatttttgtggactctttgcctcggacccttgcaagtagaggtagacgaccgaaccagacaaacacggtaagggctcaaacccaagcaaatattgcccctaggcagtgcctagcagacatagcgagtttctgctaacatgaagattgactctttgcatttacgtacatggtgcttgaggactgtatccgttacgaatgcatcccaacgaacttggataatcgacggcacataccacaactccgacggaaaagtattagattgcttcttgggatataataccctttaagcaactggcctagtgtaccccacggaccaggggatattgctgtgctcattgtcatcattcgcaccgtgatatgtacattttgaaaatcgtgttcgtcgacaggaacaacgtgcaccagccctgcttgtacttcgcgacgtgcatgtatcgctggattgcaggtgcatagtggtcaactgtttcgtgtctgtcggctacaagcgcagccaggtgcatggttcaccccagtctgccacagcggatacagtaagctgatcgatcgtcctctggcttcgttcaaccacacgaacgttgaccccctatacgcgcaagtgtaagcgccaattgcacgcggtcatgagttcatggagcgtggagacgtggaattgccgtgaaactatggattacgattccttataaagcttttcctgagtctgcctctcttcaacagataagttaccactctcgtcggggctgcagtgagaaactggtcgtagaagccgacgaggtagccgagcggtcaataaatcgcccctcgggggtgatcgccgccttctcaaagacgcgcgccatgtcctccaagttgcccagcagcttgagcatcgccgacatcatgtcgatcttggtctccagtctcacgacgcggccgctgcggtcgtcccagtcaaaacggacggatccacacatgaccagccgctcgttcaacatcttcttggccagcgactcgctgccaccctccgcatcggccttcgacaggtgcgggtagatgtagcgcagcgagttctcggtaatggtgagactgaccttcgtagtggccaccacggagccactgtcgccatcttgctgcagccgcttgagctgcacctgcacgtcgccgtggtacagggacagcagtttccagtgcttgaggatggcgtccgggccgcacacggggccgtccgtcacgtccggggtcatggtggctcggaagaagtccagctgggcgtgggcctgcttaaggcggctcatgtcgtggctgtcgttcgtgccgctaatgcacgaggacgagaacatgtcgggcaccttcatgggcgccatgtagccctggcggaagaggcggaagtattcggtggctaccatccacacgctctcgttcgtgggggcgcagcgcaggatggtctggcgcttggtttcgagcttctgggtctcctcctttagctcctggatgctgttgtccaggtcctcggcgtgtttgcgctgtcgcttcctgtacctggcctggttgatgcggcagcgctcgcgacgtgaggccgacacgcgcatcttgcggccctcatcggggctctgcgtctctgtagtgaccgcgtctgcgagcgactgcagaggagggaggcgcttgtgtccgataaccgagtgctgctgttggggctcgtcgagccgccgggcggtagtgaaggtgcggtagccgtcgtcgtggcgggtgaaaggggtcacgcgctgcacgacgcccccgatcacgctgtcgctgagcgcgtggctgttgggcggaaccaggaagctgctagccatgggtcctgtgtatgcgtagtatgatcctgggaggtggctgttggctgttgcgctcggaggggagaattctggaatgagtcttcccacccccgacacccccgacggttgctggcgcgtggtcactcgggttgtatgtaattcatgcgggcatcaccaattacgtgcgaatgcgccggtgcagtcaacccgagaagcgtgcatctgtaatacggtctggggcctaaaagttctggatcagagcagagacgagtaaaggacgataacaacctcagatttgtacaacagcaaccacacgggaggtgatacaccatttcaaggccaaattgagagaagtcgtgcttcaaattgaaaaccgccaaaagcaaattgagaaaacctgcataaacgtatacttttatcatctaattaccttcgagattagatatggtgtgcaaaaccattgacttgtccactctatgctgaccaaaaaagtccctccggaaagctttagccggggcagcgccccttttcttgaattctctcattttgattttggcgactctcaatttgaaccgcgattcctctcaatttggccttgaaatggtgtatcaacagcgcaccccccgctacatgtagctgcagcgcggacgacgacaggcgcacaggtgtacagacaacgacggataaatacggcaacgcaaaacccggcacacatatgttgtactttttacaataagtaattcagatagccaatcaacttcgatatttacacttgacatttgtattccatatggttttaagtactttctctaaatttgtgtgtactttatgctccgttacgtgtattttatgtcattgccttgtacaatctctatcgttcctgacagagaattctgacacatttactatggaggatgccattcagtggtgccggatttatccgtcgttgtctgtattgccaaacgttggtacgctgcatggaatgcttcttggcatcgaaagctagctagcttattgttactggaatcctagaagtgctgctacatactgtcggctcagctccatccacgtgaacatggactgacagtcattatcgttaggtacacatacacacaggaaatttgtgacggcaggtttggtaggtagtttgactcgtggcttagcaccatagatcatcttcgtaccatcgtggatcagcttgtaggactaaggtcatggatcagcttgactacagtcatggatctggttggctatgatcatggatctggttggctatagtcatggatctggttgggtttgatcatagatcagggatccggttgggtttgatcatggatctcattggtagtgccatggatcaccgtggcggatcatggatctgaaccggaatgggttgggatgtcatggatccgcaatgcatttgccgctaagacttatcaacatgttgttgcattttgctaaccaattgtagccgatgaggctcacatggttggcgcaagcagaaccaatgacttcttgagctctaactactactactacactcgtattgcaagcatgtttctcctcctgcaaaaggtcgactacgattcctacctgcgctttattttttggtttcccttatggccataccgtcaaaattccaacggggttggagcgcaggtggttgtcatacagccagcggatcgctcgcgagaagatatccgaccccggacgttagatccagaaaaagcgtcgcctgccaatctcgtcgcggaggattgcgacgcgaaaaaactcgacgcgaaacgcggcgcgaaaaatcgcgacgaggaaaactgcgacgaggacaaccctgtcgcaaacgtgccggaattaggcccgccgacgccggataacatggatttggggcgcgggaccgcgcacgtcctctcggtgacgatgcgctcggcttctgcgcgcgcaacgaaccccagagatagagctccagatgtcctacaagagctggctgctcagaacccatcgagcttgggcaagacccctcccagagcggctaaatgcgcagagtcatggcccggggcattttacggggcacggcgcgctaaacgaagacgcgtcttgcgtcggatatggtggtgcgttcaagtttgtgggtgacatatgggtcgcgacgggaaacacgttacgcgacgacaccaagtcaaagcgtcagggttacgcgttcgacagcaccgccgactcgcgcaggtgaacgcgctagaagtcgacgaatatgtagacgtcccagatcgaacgcggggcgacgtcgcgatgacggacacggctgaagtcaatttgccaatacgctatcgcgacagtcccggttacccccacgggcttaagctcatgcccgacgcaatggtcggtcgcgagctgcgagaccatgaaggcaacgcggcgggaaactcttcgcggacccggtacgcagagatgctgcaccaccgagaggaagtcgtcgggaaaccagatgccacgaaacgcggtcaatgtcgcgcgacgggcagtcacgccgaagcgagacgcggggcgatgggcagtggcctcgacgcggctaggacgcaggtgaccggcatcgagcctgctgcaacgagcaacgcgtcgagcccgatcaggaggcctgttgaagtgtcgaaatacgtggagggtccaacgtcagtacagctctcagcgtgcgacgacgcgataaacagaaacccaccttgcgtcgaggctgattgggaattcgaggttgcgaggaacgtgtcggacgccacgattgactcgtcgcccgacggaacagagtcgacgcgccgagggatatgcatccttcagaaccgccgactcgcgcaggtgaacgtgctggtagtcgaccaagccgggaacgacgccgatcggacccagagcgacgtcgaggcgatgatcagggctagagtgaattcgtcgatgtggtattgctgggatcgcggcggaataggatttgcccgcgggttagagctcgtgctcgacgctgtgtcgcgaggcgccacgttggtgagcccgtacgccgtatgtcttgagacaggccgcacgccttgccagttttcggtcaaggacgtttccaagttgaggcttgaccgcgctatgatcaatggggcgaccccgtcgaacgagcccgccgactgccgcgacgagatgccgctagaagtgagccgggacactagcgctgtgaagagcgacggcattgcgtactcaaaggtcagggacaagcacatcatgacggttcgcgtcgtggtgggcttggtgccctcgtttcggctcgcgcgcgaccgagatccgcggtgtacgtcaagggcgataattgccgtcggaaaactgccgcaccagtgcgccgagcctaagcgacggacgctacagatcggaccgcgagcccagatgcagtgcgtcaggttgtgcgccaaagcgcaggacagtcagaacgagtcgcgtcgcgagacgagtagctcgcttcaccaactgtatttcgacgtccgcacctccaagcaaaaccccgttgaagagtttccgtcacacgccgcgacgtgtttgtccgtgtcaacgaacggaccgtttggctccaccgatacgtgtttaccggagcacagcccgacactcgctccggacgaggatgcttccgaaggggagaaaaccttggagctgcatgctggccgagcttcccgacatggatgcgcgcaccccgagtccgacgtgacctggagaggctatactgacgaactagatgccaactgcggaaagtggcgacgcgacttctcacgtcagcgaatcggccgttatcgtcttggggcgatctattcgcacgacgatgaggggcggctgaaccgatccctggtgggtgagcgcctttagtggcgcggtggaagttggcagggtggccgccgacaggtggataggtggaaatcctcgactttgggtatggccagagcgaggggttggatgagggaagtgtggaggaccagcctgttgctgaagatgggacggcggagggccgtctcataaaagatgtgaagtagtggagagaaacgaaggcaaagaacaagaaccacgtgttggagttacggctacaacgactacgagcaacgacaacgtggtgcactaggaccccctcaatggggtccatgtcagagaacgcgacgagggacgtcgccgacggcgacgcttggtctgaggccggcacgcttgggcgtcgctgtccgaggcctcggacttgaaccgcgctgtgacttgacgtgctcgatcggcagcagcagccgaatgcgacgcgactgcgagccttggacggctgcgctgtccgaagcggtcgtgtcggccactgtcaaaggtcgctgactgtgccgccgagacgaaggcgaagacgatggagtcgagaccgaattgggaggcctgcacgcttgacgcgttgatctctcggctccgctgtaccgaggtcgtcggacacccgctgaagctggcggcggactagacgccggacctggacggagcgttggacttggacggtgcgtcggaacccgaggcgtacccgggaataacgaggtattagccttaggaccgaaaacgggggcagcagaacgcacgctggcgtccgtacgcgacgtagtggaagcgagacaggagcagcgggagccgccgctcggcttgactccgaaggccacagcgttcatctccaccgcgacggaagcttcaagtcgacggatcaggtcgtaggtgtcgatgtgcccgtacgacgtgacgacaccggcaagacgttcttgaaatccattgcgcgcgtgctacgccatctaccaacctcgacgcgcttcccgaagcacccgtcctcaaaccgcgacatgctcgtcgcggtcctggatggccacgtcgcgctcgtcttccagcactcctctttggagagtcgaagcttgacgcacctggtctctcacgacgcttccagcgtcgcgcgcatgctcgacgccgccaggtcttgacgcgcgcggtcgcgctcggcgaaagctacgccgcgttgctgctccacagctacgaaggattgctgtgcttgatcacattccgccacggtagcgccgagtcgcgattggaccagggagagatagcttgggcttccgcgagctgatcggacgggtcagggaggcgagaccgatgtgctctgcttgcatagacgacgatgccagcagtctcgaggttgtccgtgtcgggcccgccctcctctacgtagatgtcctcagcgcgaaccatgatgctcgaaaggcgacgaagcggacggcgacgacaaaaatgcaacgaatggagatgcggccacagcgcggggcaggtactgcaacgacacacccacctggggaatgcgcgtgcgtggcagcgggacggttgtggtgtagtgccccgcgaagaagtgggcacgccgggcgccggaggaagaaggcgccgagatggatgtcggcggacgcgagtgatggacctcgacgcggctgatgaacgcgacgcggattgatgggcgcgacgcagggccgagctcgacggaaagtcggcgtgggtgatgggccgtgagacacggtgccagaatccagtgcgacgcgtaatcatccgacgggccgaccagcgcgcccgtttcccccaaaccggtcaaccctaaaccccgtcgagaaaacccgtcaaccctaagccccgtcgagaaatcccgtcgagaaaccccgtcgaggaaccccgtcaagccaaagtcgtgattacgttacgcgaatcaggttgaagagcggcagtgcaagcacgacagacgcagggataggcgtagggtggtaggcttagcaagcagtagtacagagtagccagtagcaaggacataggatagggtaaagactcagtcccgaaatttctctgaaccacacagacctctcccctccggaagatcgccaggttcttgaaaaccaccaagcgtcggcaagcagagccgcaaggaacacgcggccccccgttgctcgctggctcgggcactcaccccctcaaaccccgtgctggaaacgaaggcgcgtaaaacgtataccggttaggaggcgctcgataacgcacagcctagacgaaggaccgcacggcctgataatcgctgtgcacaagaccccgcgtcggcccgataacgccacgcaacaagccccaggaaacgccggcccgataagtccgcacgcccaaggaacaaccgacgccctcagacaaggaacaagcgtccactcaaccccccaactctgaagcttgcgaagacttgggctctatattcgaagatacgctactcaagatccgggaaattgcccgtcgcgaccgcagcttggacgcgtcgggtttgtgcgaggacgagctccgcgatttctgtgaggccgctactccacattttcagcgtaaatgatgggcggtagaaccgcaacagagcaacacgtacctttgcaggcgtaactggtcgtgactgtcaacaccccccatgtacttgttgtacaataccacaaactccagacacggaatgtttgcctgtgagccgtccttttgcttcctccgcacaatcggacgtatagcggaggcccagtcgccccaaagtagcaaattttcgagtcaacccaccgcgtcgagtacatttgacgattcgtattgttccgagcaagaatgtatgagccgcgcggcatccctctcgaaactgttttttttgtcggtcttcaagtctttggggaagccaagacgcgtcgtagaaatcgtcccgatattgtagtaccccatgtccatcaaacgaaaccccaacgtcaccgaagaatactcgcgatcagtgatgatgattcgattcttggatcgatccactcgacgctgttcccacaaggctttaaggtttcgaaccacagcagctggtccacttctggtgcaacaaattgactgttttgtttcttaccgcaataaacctcgaacctgagcatgaatccacagcgttcagataccgactatataaaatagcgcaaatgagcatacctggagcagtagtgggttttcccgcaacacacagcgaacagcttggtgccgtacttgtgcggcttattcttcaggaaaaatcgtattttgttccgcgaacttcttgaagggataaccctctcgtcgaatgcaacccagcgccctaattccattccacccttgaaaatagtctgtaacttgtttatcacgttgcgaatcttccatgcccggtccgtcttagcctgcggagcctggttgttcgtaaagtgaagaaacctggcgaaggacgtgttagtggaccctttattaaaataacgtggaagtcacagtacctgtcaatctccttgaaacgcttgcgaaccataaatggcgaccaagttccagctgggatcgctccacggcctcgcgtcttccaatgatcttccagtcgagactttatcgggcaaatagccctggatattactagggccagaaaatgcatgatctccgcggcaagtacgtctttgagcgcgtccagctcctttttctttgcttgaaacatttccttgcgtttgtggatgtcgtccatcttcttttcaatggacaacttcgcctgtcgaagtctttccggtcgtgtctgacgctcgtaacgattagtttcctcggcaatctccgtccagcgagtcttcggcatgtagtaaaacatatatgagaaggttccatcgttttcgctgcctctatagccgaggcagtaagttgaggagggtccgtaaacacatccgtagcgccggacaggtccgagtcatcccgttcgttggttaccggtagcaactcccaaccattgtcagacatgcctcgaagcatttcatctgttatgtagtcctgggggctggcaaccgcgcgaatttcctctctgctgtttcgacactaaaactttcgtttccggtatcacccgcaatctaaaggtcatctgcaaactcatcttcagaatcgtcgtcggcactctcgccagaacagccatccgattccagcacctcgtgatcgtcatcaatacccacgttcacttcatcagcaagcatctccgcacggcttttcgatttcttcccagataatcgactcaaagagtacgtcgatttcgcgagggtgttgcggttgtttctgctgtctgccggggcgattttctttttctgggagccttgcctgactctctggaatctgctcgcggtactggcctagcatccgcatccgcattgtttgagatcccgtcaccccaaggctcaacaccaccacctgcatttgagatcgcctcttcctcggtagtctcgggaaagtaatccaggtaatcgtactcgtagtcattttcggttcgatcatcggtttgccggctctccgtagccacattgtcagcatcattggttactcccactccattattttctggaatcgatgctctgcttgcttggtgagctgtagatccaccgctgggtttctcgttctcatcggtatctttccgagggctgtcatggcctaccgtcccggtagcatcggtgacttcagctggagctggattttcgagcatagcttgacgtgctgctttccggcgacgcctaaacttctccaatttgtcagggcagttgagattggaggcaggctcccagctcgtttgggaatatcccttccatttcacctcaaagtaagacaagccaaaacgaaaagtttcacgaagaattttttccccttcgtacacttcctccgaaccggggcaccattattacagttagtacatttttcccaaaaccaacattagagcatgtgacaaacacgtgctgcttgttacctttagaaccctcttggtgtttggcagggattttagccgtcacgtggctacctcggtcaggcaagtccgcttttcgggttgcttttttcttcaacgcgcgtgcctcttgaagttgtgctgccttgaacttgttgaggagctccggacaatgcagattcgattccggctcccacgacgtctcgtcgtaacccttacatttcacatggtacttgggctctccacgcacgaacttcatctcgatgatcttctcgacttcaaactcgtagtctgcggcattatggacgtctactataagatcgctacgacgctttgctagtgaaagatgcgttttgcttaccagatgcctcggagttcactgtcctcgctgcttttcttcgcgccttccggggcggctgggcgtcgcgcccgctgcctactcggcgcttctgtgccatctcgacgagtgacggtggaggggggggagcaaaaggcgcacttcttgcatccggatacgtgggcattgttgaccttgatcatacaactatactgatattaaatttccaatctaaacacatccggatacgaagcacgacagagcagatcgtatacttgtaatatctcgatgttgagttgcaagtgccaatgttgacatcgcaggtgaattgcttagcagattcctttggcaataacaaatagactggtactgctatatgtcctaaactgcttctagagctcctcaacattgttttcacagtgataaatacacgctcggcgtcgcactcaccgtgcacgtaacccgctacatggcaacgggcatcacgagcgagctcgcgagaagcgaaacgacgggcatgacggccgcacacccccccacgtgcatgtaaagaagagggattcaacgttggactggggaatgtcaacattgacatcatgaggcgctggaacgccagatcagcgaggcatcgaagctcaccagaaaacttgacggcaagcatagcggcacccggagcagcgactgctgtacggtgagcatagctgcggcaagcatagcggcacccggagcagcgactgctgtacggtgagcatagctgcggcaagcatagtggcggcgtaggcgacagatgaacagcgagcatggcggcggcgagtgcgaactggggcagcattccggtgagcccggtcacagcatcacggcgagcgtagcggtagcggggacaacgagagcagcatgacgagcatggaggcagccggcacagcgagagcagcacgacgagcatggcggcggccagagtaaggatcagcagcatggcgagcttggtggcggccttggcggcaacggtcgatgcgagccgggtgacggcatagtcggggaagcgcgctggagcagtagctggggatttcggaaatgaggtttgggattgagcgcgcggaaacgatcttctggcacggatcgcagcgcgagcatgattggccgcgaaatggctggccaattacacgtcgcaaattcaaacgatgggggcgctgattggcgtagataccggagcgaacccacgggcgaaaatcggcgtgttgcgcgaactcaaagcgcaagttggaaaagcgcgcgaaaagctgtgtgttgcgcgaagctcgatggctgaagccaggctgataccacttcgtgtgacctttggattgagccaatgctgattggcttattagcttcaacttcaaccctcgataagcactccgaattatagtagttcttgatttagtgactacctagtacgagggcatttcttttgcagttctatagtaacttacttttgcaagttcttctgcaacagaaatgatggcaaacggtgcctgaacgtcgctcgcctcgctacctaggccagtgtggtgtcctcacaaaacgcggtacccgtagatatgaaataccaaccaatgcgtgcacacggtttctataggtgagcgctagcaccattgatcttgtccgtcgaaaaagctctgcttctgggtggtcaaaagctcacgagacagcacactaattccctcctgttcctcgacaacactgatacgaatagacgccagtgacttcagcgaggaatacgccgcgctcgctaagaacacggatggttgatgacccccccccctcctttattttactgcaatttacgacatataggagcccacacaccgcttgacctcccatgccgcgccaccgtgctcccggctgggaggcagcgatgcacggtggtgcggcactggtggttgggtctgccaagtcaccactgacacctccatgcagcccccaaagctccctggagcgccattgccaacggacgcgaattaccctagactttcgcccagaacgcacctcacctctcgtgccgcgccaccgcagctcgccgtctcgcccagtgaggtgcgttctgcggtctgcgggtggctggtatcggtggtatggcgaaagtctagggtaattcgcgtccgttggcaatggcgctccagggagctttgggggctgcatggaggtgtcagtggtgacttggccggcctgtaacaggattacacgcacaagtggctacagtcacttgtaactctatcagatacgacgtctgttagaggttcgaaagactttctcgaccttggtgtagacacaccaaaggctgcatacatttacgaccaccacgacgggtggtccatagagacttaggattcctattggctgggagcagcatctcttagccaatgagcaacatgcatagcattggaattctgccaaccagccgttggcaggttcctatcttagaatattacatttagaggaagtcagaaacataaaacaaaaatagcagttctcatcttttaccaaaacccgctacttggagtctttatcttgtttaaagtatactcgtggatctcgagtatacttaactcaagtaaaagaaacctacgcttcctcatacacgtgcgcatacgtgtaagccgtagtagtgagccaaggcaggcctactacacctggtagcactttgtagtccgtccaacgaccgactacctgaacgttcgtacggagctgtacgaacgaggagccgagaaccttttcatggatacgtgcccatggaaagctccacttcgcctgcagctcatgttgcacgcgctgactgcctccacctgtcggatccagagtgggaggcactccaacgactgtcaacagtcattggagaagcggctgtagctgcaatgctgcgtacgctatcgccgacagagcaacatggtgttgctctggggttcatcatgaaggagcagcatgatgttgcttcctctatcacggtggcgtcggggacgacaccgcgcgagcaatcgttgaagctaaacgtgagcaactctcttcgtgctttggttgattcgggcgcgtcgaataactttgttcgactgcgaagtctatcaaggcttgatttcgaggatttaaagatacctcgaagtatgttggaagtacgactggcaacgggtgccatcgtaaagaccgagaagcgcatggtacgcgtgcgcttcacgtatgaagatcaagagtttgtcgagacctttatcgtcctggatctggacgataagtttgacattgtattgggcatgccgtggcttgcacgacatgatccggtcatcgattgggagaagcgcactctcgtgcgtttcggtcgcgacagcggaagagtgagcgatggccctgttgccgctacgcacgcaccgacaggtgcgcgcgactccccactcgagacagcgcctaatgctgctgtcccggagcgccctgggcgcgcgcgagcacgcgcgcaagagcagcaagcgtcggcgttgccgctgacagctaatgatggaaatatgttgacctcggaggtcgacacccgcttttcagcgaatcaggaagagtctccgacctcaacgggtacggatgacgcaggcgagtcacacgcctcagccgtggaggctgacgcgaatctgattggatcacttttggccaatcataagagccaaggtgacgaaacgccgtcgactccgggagtcgatggcttgggtgaatttgattcgtcggctcggggagccgacgcaccctccgtaatggagggctccgccaataacaggcgtcgaggtaaagatggcgtgtcgactccgcgagttgacgctgcaagcggtgcggacggttgcaaacgtcccgcaccttaaaaatttgcatgctgtcgtgcagccgggctgcacgacgaagcgccgggcgaccaagccgggcttgaagtcgctcgcccgcgggatgaacccgccggcggtactgaagaagaacacccgtccacggctgggcctggacgaggtcaagagtcatgcggagccgggctccgcaggacaagaagacggcgcatgccaaggtcgctgcgcaagtctcggcctggggtcgagacgctacaagaaatgtctcccgggcagacggaggcagagaagccggacgtcgagacgttgaacgtcttgacgcgtacctgtgccgggttccggtacagggagatgactctcgctaaccctccgacgcaagcgtcggagttgacttcgcttccagtcatgagctggaagcgcttcgcgcgtgacttgcacgatggacgcatcgagcaaatatgcattctctcggacgccgagagaacgaagagcgagaatgaagaactgagacagttcttcatgggagagcaccattgagagcgaggacactctcagtgcgaagacgaagaaggagcgctttgaagagcagagctgggactcgttgaaaacgaggccctactacgagatcttacgggagtacgcgaacgtacttccggaagagattcctgcggagcttccgcaggataagggcatccagcacgagattgatctcgtgccggggacggagtactgtgtcacgcggcagtgggcactgccgcgagagcaggtcaaagcgatcgacgactcctttgagagtcgtcgcaaagctggacaagtgcgggaatcgaaatccccgcacagtgctccgatgttctgtgtcaagaagccacagggcggttggcgcatcgttcatgcgtacaacaagctgaacgatgcgacgataccggcgctgacaccgataccgcgaaaagatgtcatcatcaattcgatggccaggagcactatctacagtgctcttgatctgcgcgatgggttctatcagatcctcatgcgtgagagcgatatccctctcacggctgtgagcacgccgggtggcatgctctgggagtggctggcgatgccgcagggtctgaagaacgcccctgcgaccttcaacaggtgcgtgacgcacttgttgcgctcggtgcgcgacttcgcaccgagctacttcgacgatgtgttcgtccacagccgggctgcggacgggatgagcgatgttgagatgcacaaggtgcatctccggaagctgcttgcgctcatgcgcaagcacaagctctatgcgaacctgaagaagtgcatcttcggggcgagcgagatacccgtgctcgggtgtctcgttggtaagaacggtgtccgccctgaccctgagaaggtcagagtgatcaatgagtggccgacgccgtcgaacgtcaaggaactgcggcagttccttggcttggccacgtacttgtgcaagtacgtgaaggactacgcgggcatgatacgcccgctgtcacagctcctgaagaaggacgccgagtgggtttggactgctgagtgtcagcaggcattcgatgcagtcaagcggagcttgactgaggcgccgatcttggcggtggccaaccaagatcgcccgttccacgttgtgtgtgacgcatccgacttcgcaatcggatgtgcgttgatgcagcacgatcacgagagtcatgatcgtgtcgtctactaccaatcgcgtcagctgaagccagctgagcgcaactacccggtacatgacaaggagcttcttgccatgaagtacgcactcgcgaagttccgagtgcatctactccgaagcaaaccgttcgtggtctatacggaccacgcgtcgttgcggacggctgtgaagtcgccgcacatttcgcaacggatggcgagatggctctcattcttcgcagagtataacttccgggttgagtacaaacccggaacactcaatgtggtggccgacgcgctctcgcgtcgacctgactatgtcacgactgatgccgacgtcaatgtcattgacgccatgcgatcgagcaccccaacgtcgtcactgatggacgacgtgaaggtcgcgtacgcgcacgacgcggacgcgaagctcttgctggcctacggctcagcaccttctgacaaagctcgtcagaagctgccgaagcatcttcgtgctcgtgcacaccgttaccgggtgcacgacgggttattactctaccgtgcagtcgacgacaacccagaccgcgttgtcgtgcccaatgaccatgacctgcgactcaggatcatgtacgagtatcacgatgcaccgactgcggggcatccgggccgtgagaagacataccttcttctcacgcgagacttctactgggcccaccagtataaatgggtgcgcaagtacgtccgtgcttgcgaggtttgtcaacgtgtgaagcctgcgcctttcgcgcaggctcccttgcagtcactgccaactccacgagagtgttggcagtccatgtctttggacttcgtgttcggtcttcccccggacagccaggggaacacgggcgttgtggtctttgttgaccgcttcagcaagatggtacatcttgctgctgttcccgctgaagtgactgcgaagcagacggcgcgtctgttcgttgacatggtgttcaaacaccatggtatgccgatcgacattgtgtcggatcgggacccgcgcttcactgcacacctttggcaagaagtgtttacacttcttgggagtcaactttcgatgtcgactgcggaccatccgcagacggacgggcagaccgagcgcgtgaaccgcgtgctcgtagtcgtgcttaagagctacgctcactcgttccaacactggaacgagtgtctgccgatggcggagttcgccatcaacaactcggtgcatgcctcgaccgggcatacaccgttctacgtgaatgccatcaggcacccacgcctcccgagtctactcgggctggtggctccttccttaactgggggaggatctacgactgcaacgcagcagccgcagaatgccgctgacacttgcacagtgtcagccgcgactccgtgcaagaagaagaagaagaagaagaagagcgtgtctgtgcggggcacagacactgacaagaagaagaagaagaagagcgtgtctgtgcagggcacagacaccgcgaagacgaacgcagaggccgggcctactgctagaaacgagctgaacgagttcagctcggacgcaatcaacttcgtgcagcgcagacaagccgtcattcggtttgtccaagacgctagttcagcttctgtcggtcgacagaagctgcaatacgcagacaatgttggtcggggcaacactaatgaattcaagaagggttcatggttttgttagcaactcaaaacctgccttaacatgcagtttccgacttcggggcgagcaagctcgctccgcgcttcattgggtctttcacggtgttggcacggcatggcaacgcctacacgctagatattccatctagcatgcgcctccacccgaccttttacgtcgggcggctgaaaccataccggcagcacgagccacctagctcggctggcccgaagcggaagccccagcgggagcgaacctctgctccagcgcgtgaacgcgctggcccaagcgcacgacgcgacctcccacgtcgacagagatgtccgacgcggtctgcgaggcctgagcaacttgagctctcaggtcgccatctcctgcttcagagcggcgaactcacggctctgaagctgttccacagcagcgacccgctcctcgagcgtcgggccaaggtcaaccccaggttgaccatacccggggcgtgttcccaccaccgccgcctccgatccgcgacgcccgcggctcaacactgagcgtattgtgaaccatagtatcccgaaaacgaaccggcagccggttcgttatcatattcgttggagagggtttccgccccaccaagatacatgggagccacgggacgtcctgctgcaggacgtcccggaaatggtgagggagtacgaagctcactacgcactgccgacgcgaaggtagtgcgagcgctgtggtcacctacagcgcccgaggccccacgatcgtcgcgttcctcacgtgccaagaacttggcacggagatccttgagactcgcaggtacacgaatcgtcgtgtacccgtttaggtcgctgtcgctcaagcgcgccgcacccggaagacacaacgtgcactggtggccttcgggcacagcgcatggaataccagcgtccacagaggatctgtggagctgctccagccgcccgcgcgtcgaaaatgtctcgaagcgttcacgggcatgcttagcccgctcgcggtaagcagccggcctcttgttgaagttctcaacaaaagcgttccaactttgacaaagtgcctgccactcaggcactctgctgcgagaagaagtcttcttgctggagaagtatcggagctcgtgggagagcccgatgtaataatcgcgcctttgattcgttaacggatcaaagtgctgctcctccgcaacagcatcgtcgttgataccgctgcatacgtacagcgggatttcgtttggaggcacagtgtcgcgcacacggtctgcgatctctgacgcagacggcatccacggatcgcgcgctgcctgagcggcgcgcggagaacttgaagacgccacctcacgcggggagcttgaagccccagcagcggagagcggagtttcgctctcgccgcgcgaacgcttcgagctcgaagcgtccgagtcatctccttcacgatggcgtcttgacccggcatgcgggtcgatactatcactgtcgatagactccttgcgcatgttggaagagtcctcgccctcttccatctctacatcgtcactcccatagtcaacggcgtcgttgactacagaggaaccttcgaggacaatctccgactgagttgtccccgacgcggcctttgcagcgagctcgtcgcgctttgcctgctggcgctcatggttatgagcaacagagaggttaccctctgttgtggcggcggtcttcttctgcggcgagctcattgcggaatgagctcgagttttctttctcccaacgtgaagaattgacgaatggtcaatttcctgattgacgtgccgtgactcgacgcgtctaaccttgaggggggggatggtgtaacagggttacacgcacaactggctacagtcacttgtaactcgaacagatacgacgtctgttagaggttcgaaagactttctcgaccttggtgtagacacaccaaaggctacatacatttacgaccaccacgacgagtggtccatagagacttaggattcctattggctgagagcatcatctcttagccaagaagcgacatgcatagcattggaattctgccaaccagccgttggcaggttcctatcttagaatattacatttagaggaagtcagaaacataaaacaaaaatagcagttctcatcttttaccaaaacccgctacttggagtctttatcttatttaaagtatactcgtggatctcgagtatacttaactcaagtataagaaacctacgcttcctcatacacgtgcgcatacgtgtaagccgtagtagtgagccaaggtaggcccattacacggcccaaccaccagtgccgcgccaccgcagctcgccgtctcgcccagtgaggtgcggtctgcggtctgcgggtggctggtatcggtggtatggcgaaagtctagggtaattcgcgtccgttggcaatggcgctccagggagctttgggggctgcatggaggtgtcagtggtgacttggcagacccaaccaccagtgccgcaccaccgtgcatcgctgcctcccagccgggagcacggtggcgcggcatgggaggtcaagcggtgtgtgggctcctatatgtcgtaaattgcagtaaaataaaggaggggggggggtcatcaaccatccgtgttcttagcgagcgcggcgtattcctcgctgaagtcactggcgtctattcgtatcagtgttgtcgaggaacaggagggaattagtgtgctgtctcgtgagcttttgaccacccagaagcagagctttttcgacggacaagatcaatggtgctagcgctcacctatagaaaccgtgtgcacgcattggttggtatttcatatctacgggtaccgcgttttgtgaggacaccacactggcctaggtagcgaggcgagcgacgttcaggcaccgtttgccatcatttctgttgcagaagaacttgcaaaagtaagttactatagaactgcaaaagaaatgccctcgtactaggtagtcactaaatcaagaactactataattcggagtgcttatcgagggttgaagttgaagctaataagccaatcagcattggctcaatccaaaggtcacacgaagtggtatcagcctggcttcagccatcgagcttcgcgcaacacacagcttttcgcgcgcttttccaacttgcgctttgagttcgcgcaacacgccgattttcgcccgtgggttcgctccggtatctacgccaatcagcgcccccatcgtttgaatttgcgacgtgtaattggccagccatttcgcggccaatcatgctcgcgctgcgatccgtgccagaagatcgtttccgcgcgctcaatcccaaacctcatttccgaaatccccacctacatcatcacgctggaagagtttatgcgtgatcgctaacgtgctccggcaatgccgaagaggtgactggtagcttcagtaaatctctaatttgacgtatccactcttgtgttggcgcttatctcaccacttctgcatctttttgtgaagccaaccatgtgcatctactcgtacatctctgattgagtcaccaagtcgactacgacttggaacgtgtctacgctggcttagacacttcttactgaagccagctcaacaacgacttataccaagtcaacgttgacttacagtcctcttgattctaaatcgaattggtccacatcaatttatttcaactgtaggatttgcggtttcactttctcaaagaaccttgactgcagcaaagtgctgatggcgatgctgatagcgaagcgatctcaggctgcagagagcgagggaactgctgtcggtgctgctcgccaggcgcccatgacgaggagcaagaaagctgcaaaggcgacggacaagccagcgacaaagcggacgatcgcgcccactgacaagtcagcaaacgctgccaagaccacgcctgccaccggcaatgcaaagcagaagggggaggggtcagacacttcgtcagacacttcgccaagcccccgtaagcagaggaagactgccaagaagactggcgaaggatccaatgggacgacgcgcgagttgggcgccgcgagtacatcgaaggacgaggcgacgactcgcgatgaagagacgactcccctggtacccaagcacgcgctccggtccacgtgcttggctctacaaaagaagatcgcagacgaaaagggcgagcaccggcaaggctcacggcgcaaggcaggtgattactacaagatggcagactaccagaagcgtgtgtgggcggagaaatacacagctgctaggaacagcggcaacgacttggactacgaggctttgagcaagttgactcaattcaaggcgttcaaaaacaacccagaagagctccagcgtcacgagcctgcgctgctgaaagaattctacgaggtttacttagcagaccaagccctgaaagcagacgcacacgcgcagaccgctggatcgggttcgtcgaagctatcgcaacgtggcggagccgagcacctggcgatcgagcaatgcgacatccaggcggctcagcagcttaccgcagccagaaaccaagcatcgctagcgtcagaccaagctccagggcctccaatctcgcagacacccgtggccgtgcaggaggaacgtgccccagctcggagcctgcaaacccaccctttgcgaggggggtatgagcaacttgaaaatacatttcgcaagcactgcagcagttccgagagaagctggatgaagagaagcagaaaggggctcgacagctggaggaggaacaagcacgctcaaggaaattagaggagcagttagcagccgctgcgaaggagctggccgaactcaggaatgatggcagtggtgatggcagtggcgtgacgaggtcggtgaaaccttttactcccaggtgtatagcggtagcccagaaagggttgacgagcaaacctctttgggaaggtaaaccctgaacgcagatttccttgaacgcaggttctgggaataaatgcggccagggtggcgtggcaccttgtgaatccctatcggtgtcgtttatcttcggcgagcctgaatcgatcaccaggtgagttgtctgtggggttgaaagccttgagtgcgttgagcgtaacgttcacttgtctgaacgcacttctctgaaatggctgaagcttgaagcgtgagtgaaggatcagggttactaccacgagttagaaccccagaaatacacatcactttcagataaccaatacaaatgcagagttatacacaaacacacagccgccacttattcttagacccttgggcggtgggtcgtacaccagtcaactaatccgcgatcaaggtactggtcaaccttgaacgcactttcacacgcgcaccaccctcagatgagggaaatatacagaccaaatgcaatccgatcctaaacgcagtcaatcaaactattctagggggcgactgctaccaaaccacccgagatatcaatcgttaacatgaaatgggacaccacccttacctcaacgcaatgggcccaactgggaaatggaatacgtggatcacttcagcagtcggagtaaactgattcccacgtaactggacttgaatgtgtgtgtggagctccgcactgcccttgtccttaaagacagcggacccgattcctcgacgacttgcgcagtaggggctaaaacgaactctctgattgttatctgctagactatcgctaggctttgtgtaaaggtatctctctcgtagcggtcttctgtgttcttcgccacgcgtctggcgaatatcttgacttgagtatactggaactgttgacgtagacacttcccactggattcttgcccagctgcaatgtgcctgtgtctttgtgcatgactggctcttgagaaaccttggccgcatgtggccaaggttcccttgaacccgcattccttgaaaccgggtttcagagtcggcaggcctgaacgcagtgcgtccaaggtctgcggccaaaggcaacttgcgcccaaggctgaaaccatactcagggccttgcggccaagagtaggttaactcttcacttggtcgtggggcacttggcgggacttcgtccgggtgcccagcggtctggacactctgcacttgacttcactggggtggctgagctccgggtacacgaattcgatgtgtgttcagggcctaggcgacgcgggacaccgcacacgatacgttcgtgcaggtgttttcgacggcctcaatgtgtcaacccgcttaaggacggggggcggcctggacggatcgagtgcgttcagggtttattgtctgaacgcagtcttccaggcctgaagggcccatcctaggcttgagcacacttcgctccgcggaacacagccgaattccagctcaggtgttgtcgcatggtgtacagccgggtccgggttcagtctcggccaatccgaatggcggattcaggcgggtcagtagacaggtgatgaccggttgaggtaaaacctcgctcagtctcgtcacagtggtgacgacagatgtaccgtgatagcgcatgagtggaagaagacggctgcaaaactagccgaggagaaggcgatttcaagtgacttgcgcaacaaacttgcccatgtggaaactgagttgaatttgtcgaagcaatccgtcaccacgcacgcagacaatctacttaaggtgcaggctagtcatgctaagaaactccaggatgtgcacgaagacatgaacaacctcacgaaagaggtggacgagcgcaagaaaaaactggaggaccgcgagaacgaggtggctacgcgagagaagaatatggagaacaaggaggaagaactacaagtcaaagccgaggagctgcaatctcatgaggccaagctcaaagaggagggccggcgtctccagaacgtaacccatcgcctgcaacgggagcgggagcagttggacggggataaaaagaaacgagagaagccgagtcgagagaagcaacaaggaggccgaatatcgctgaggcaggcgaagattttgaatgaaatgaagcgccagacccggctcctggaagagcagttcaagaacaacgggtgcccagctgcgtttaaagagctcgaagccaaccgcaaccggatcgaggaagagagggcggtgatgcaagcagaacgggatggagtgagaacgtagttggaatcgatgaaggctgcgctagaggcggtgaaaacggagaacagcggattacaagacaccatcgcgaggctagagctgtacttgagtatgttcaagcatagcgcggtgaccgagaaatctatcgaagagttcacggaatggaacgccgtcatccgagatgataagccgcttgagtttttgcttcagtgtggtttgacattgtgttgattcccattgtctctggattgaaaaaatgtaggaaacacgagcacaatgcagaagacgcgcgacgtcattctgggcaaaatgaaggaggcgtttggatcgaagacagcggacgctgaagagttcaaggcgcttgcggtcgagttctgggagaaaagaaatgagttggaccacgacaagacatggaccgtcatccactcgatggaccacggcagatacgcgtatgtatgcacggagattatggaagcattgggcgtgttggagaaaaccattaatccttactctgctgtagttgtgtgtgctgctgcgtaacgatgaatgaatacacattttcaagtcaccgaggacttagagcgagtcaactttgactcgaatacgcttgttttattgatcgcgaagtcaacatggacttaaaccaagtctactcaaacgtactagtttcagtaatagcgaagtcaacgtcgactctgaacgagtctacattgactcggtcgacagcgaccctacgttgacttacaaatccaaaaaaataaactcggtttcagtatgaacccccaaagggtcgttttacttgagtttgtatagacagtatccgaagcgaaaaatagccgacttttcagatgaagaggatcgccaactcgttcagctcgcggcggtgtacgagcaagcgggaagacgaatcgactgggtgtcagtggagaaagacatgaggccgtcaacatggagcgcaaccaaactgtaacagcgaatccagacgctcaagagacgatatggcaataacatgctgagtttccccccacgctatttccgcccgccaccagaacgagcaggactgcatttggaagccaaagccgcgcctcctctacggtcttcgccttcaccacataccatttcgatcctatcaccgcaagaaaccttcaacgccactgaagaactattctgcctactcaccaggcgtgatgtgcgcgcgagtgaacgtcagctaaataccggggagattacaatgggtggggtgtccatgctgatcgaagaagcgaatattcaagtgaatgacgtgtttctggatgctgtatccggcgtgggaaatgttctcgctcaaatcgctctgcaaacgcaagcatttcgtgtggttggtattgagatccaacatgacctggccgctagaggtatggagctgattgcgtctagggcatcgcgctttccacacttgctcaagatcagcgtcgtcaccgcagacatccggaaggcagcgatactgttatcagtcctgatccagactcgaagttggttcaacccagctcccttatcagctccgccacccttttattttgccacgacacggtgttcgaagaagatgtggttttggcaatgcgtgctttgtacatgaagctacctcatctacgtctggtggcgctgacaacacgagtgtgtccgcggcatcgtaatacgtgccgaaattcgttttgcaagcggtggaagttactgaaaacaattcaggttccgatgacttacagcagctcccttcgggatttacacctgtacgcagctgaatcaagatgggcgatgcagtaactacgatcactactctaacattgccgccgagggtcaaaccaacaactatgtataaattgcatgaaaatcaatcacaactctaatcaacttcgacctgcagttgagtttgacagcgtaatgaagctgctgtcgccccatgagctgtcatacgaggtctagagaacccaatacaagatgaagtgttcgtagcggacgagcttactcgagtcgacgtacggcatcgtgggctccgtaaccagaccccagctgaccatgaagactccatgcttcaagccgccgttgtatctgtcgttcttggagtcttgccacaccccgctgtccctgccgtgctcttggcgtcctccctgccgcttgtttccaccgtcgtgccttcggcatcgtgcttggacattcgctgtggagtcgactcgcgttagggcgaagtgtcagcacccgcatggtttcagcggtgggggcacgtagcttaggtgggcgcagatgcgcaagatcgtctccttgctcaactcctgccgggagtagccggtgaacagctcgttctgaatgtaatacgcctgtcgacaacaacaacaccagcatgagcccctagatatgaacgccaaagctgccaagacgccgccttaccttgtgggggttgaagatggtgtccagctcgcacacctaccgagtccacaacatctctcagcgtcagcctcccttctgctaaagctccagtagacctgacgcctcacgttcattgccgaagtagcggtcgggctcctccacgaacaggagcgtccaggtctcgatcgaaacaactcggtcttcgcagtggcaccggcagagccgtacttgtagctcctcgaccagcgtacctcgcgcgtgtgaaggcatctatagaaggcaatgatacaagggaaaagaaagttaacattagtgagcggtgcatcctatcaactcagaattttaccatcgcggagaagcgctaatccttcgcgggcacctggcaatctgcgggtgtaaatgcttgtgcggtggccaatagtggcgcggaagtccggcacccatgcccatctacctttcaaggtgagaaatccgcaaacagatcgcattggccaaaacgctctcggcgggaccttgaagagtcgcagttaccctaaccacctgtatggcttgaaccggcactttcccccgaggtttttcttatcccaacaaaatcgggataacggtcgccggtcggttaagttggtgatcgacgttgagcggcaaatcgacttactgacagtacctcttgcagtcgacgagaacgaagatgaatttgatgatgcagatgaacctacggttggagaaggggtgctgcatgaagaagacgttcgagctgctattcttgagctggtggacctggcaattgaggaggagtttccgcgtgagtttaagaaggagctcgctcgcattgcgctgcgcttcgacttgtttcgagttcgcttgggtgcggatcctcctgctaaagtgccgccaatgcgtatccgcctaaagcctggtgcaaatgccacgaggcggtccccagaaaatcgccgaccatgtaccgtcatctctgtgacctggagtttgtatcggatgctgattggtggatgacttggatacggcgcggctgtacccgtgtgacatggatggcgactgtgggatagaagtgatttctcgggataaatccagcgtctgaccgcagatgggcccaactggctggaagtgtgaatcctgggagtgcacacccagaatttcagagaacactcagtccagccgcggactttcccttacgatgagtgcctaaagtctggcggaaagtgtctctggagaatgtatcccagagtacgcctcatcttgctgtggctcagagtgccccagaggatcaaattaccctgagaatcaacccactactaccatgatcatgcgcaggaggccactaaacccactaaaagtgtggctttgaggagatacacacgagtctgcactgcagcagacttgttacccagagtgccgcacggaaaacctagagtgccgcacgatgacccagagttcacctccctgagtgcaggtgacccagagttccaaagatgattccctgggtttggaccataaatccagactctctatactgaacttaagtgtttcccgagccaacacccaagaatccccacagttccccaagattcctcagaattcccaggatttcagaagatgaccctgagtgtcacctgattttcagggattcgagtcagttcgaagccagtctgcaatcaaaatgatgcgtgaccttgaagaaccgtcatggatgcacagactggatactttcgaggagtcgagagggagtcctgcaccatactaaaccaagtctaaggacccacaattggcactttcgacgccgtgcgacaatggattcgcaagccgatcgcaagattggaccgctgatcccaaggtatactcaagacaagacattttgaccccaagcatagtgaacagaagatatttgcccgaagaagagagagagagagaagtagctgataaaaaccaaacagagttcattttaccctgtactgcgcaagtgacttcggccaagcctgccgacggaaatccgaaggacccgagactacgaccgcgggacgctaagggcacatcaatggcgaaggacagccgtctgtgtgggctccatcaaactcaagtccagttaggtggtgaccagcgacggccttgagcttcctggggtgatccatctattccatatcctagttgggtcacttgctgtgctcgtggtagcccatttcatattattccagagggtattctggggtgctaggtagtcgcctccaggattttgtattgactgcttgtgtgaagggaaggtaactgatagtgattgtattttcctcctttattggaggtggtgcgcgtttgtgtgagtctcaggggagctaggcccctgaatttcagactcgagtgagcctagtgtgtgtgtgacccaccgtccaagggtccaaaagaataagtgacggctagttgtagtgattgtatactctgtatttgttggttttatcgagctaggagggcatttgggtaaggtgtcttctgagttccaagtcccagagttgactgaaatcctggaccctgaattcgtgatattctgggtttcaggggatctgattctctgggtttgccttttggtgtggaggtgcgttctgaagtagacgtgcgctcccgcacttcttcgaggctacattttcaaccggtggagtgccgttccgtcgaagacaaacgagccgacagggattacacaaggtacccacgccaaccaaggagtgtgatttacagggtttaaagcttttgcggctgcgaatctcggggtctatcttcttgctgttgactctcaagtcgactctctgggtctacccctggggaacagtcttgggctgcgctatacgaacccccctgggcgacaaaggtttcatcggcctcgcctcagctggtgcgcgtgccccgatttgattgtcgaggatttcaccggaatcaagtgttgaagaagtgttgagtggccgtcaacttcaagctaccaagatgcctggaggacgaggggcgaagaagagtggacgcggtgaggcgtcacgtcagtcgcgtcgtgttcaaggtatggagcctgaggagcacaaggacctggaaacagtcgtccgcgacgctcggaaggtgaagcaggctgctcgcgagagcgaggcagtgcaaggtggggacgtcgaggcgtctgcagtccaaggtcagcccgctgctggatcgcaaactcaggaggaagaagtttcccctgggttccaaggttcgacggaggtgaattctgggtcgcggattcctgaagtcccagaggagcacacccgcgagggtggtgctcaggcgtctgagggaggcgccaatgcggttgagcccccggaggtgattgacttggtctcatcttcggacgagtctgttgtggaagtgaagtcggagtccgtgcgagcgaaggaggaggcgaatactcagagttccaaggtgaattctgggttcgcaccacctgaacccagagtttcagcgccaagttcgcaggcggcacccaggaagacgcctaaaagcgacacccgggaagttgctgcacctgctccggaatcgagagcagcggcgtttcgacgccgggagcatggtgctgtacgttcgacgtgaagttcgacgctgggaagaggtgaatcctgggaaggtgacgccgccaagtgtcgtttatgagtggccgacaccgaaacggatgccaactcgtacttcgcggccgcgtacgcaacgggagactacctcaagtggcgtttgtctctggagaatcaagatgaagcctggatctctgagtttcacctcgtccggtggggcgtcggaactgctcaggatctcatggcgactacgattccccagagtatcatgaccacccgcgagtgcgtcgccattctgcagactctgttcttcgaagccggatttgagtttgtcaatttgatccctggctggtcttcgacgcgtgcttccaggattccagaaagtctggtgcgctctgtcatggaggaaacccagcatttcatcgctgtggaactggtcgagtggagattggtgatagctggtgtgcctttcaaggtaaactctgaagatcacgccgcaccaagcgcccaagagcaagcaccaagactggactaccacaaggaagatggagacggtgatctattgatgacggactacgatgcggatctactgggccgacagtttgtcctgagattcagagtcactggacttaggatttcacggagcccacgagggtcgagtgatggtgagccatgatccaagcgtactcagcatggaccgcctcggccacaagtcccgtcaacgccatccgcgctgtctacaccgtcgctgtcctctcttccagcgtacaagtcttcgactggtgcctcgcttcagaattccactcccctgaattccatgtacaatggacgtgattctctggaggcggaagccaaggacgctaccccagacgcggtgccaagtgtcatcggtacctcgcgcgcttcggatgagagtactgccttgggcgttcaaacgtcttatggtagctcttcgtcttcgtcgatgatgtcgcttggacaacgagttggagctctagcgcttgtggcccagagtgccggtggcttcgcagctgccggtgatcttggatttcaggtcacccggacagtcatcccgtcgcgtcttgtgtcagtcgaccaagatgacgttgagatggcatcgtcggtgcactctgacccagagattgcacccaggaaggacggtctccccaggatttcagccacgacttccgagccgaaactcagggtttctgccccgattgctggatttggtggtccaagggatgtcagcgccgatgagcggagtcaacaccagagctctaagaacgaggtgcgctctcgacgcccgacgaaatccagaaaatcatctgcgtcgagccgctcgagtggatccaggaatcttgggtcagtttcgtccgtgtccgcgaggtctgggcccgcccaaatcgagctgaacgtcttgcgacaagagcaggagtggcaggcccgcatggaacaggagcaacgcgagtttctcgccagagaacgcctggatgccttggagcgcgagcgcctcagggaataacgtgacctggacgcgcgtcgccagatccaggaacttacggatcgcttagcccacgctgagatcgcccgagaagcggaacggcgtgcgcaggacgtggaggctcgccagacccagagttccactgaaactcaggggatgacccagagtatcacgaaagctgtacgtcttgagcgtgagcgcctggatgccgcctacgccgagcgctgacgacggcacgaagccgaagccgactcggagcgcgcgcgctgggtttccgagacctacgccggttggaaggaacaaatgtcaactatggagcagaaggtccaagaacttgaggcggagaaagagcgagagcgggagtcttccaagaatatccagcgcttccacgccggccaagtgcgcgaccttcgtgcaacattggcccaagttcaagcgcgtcgcgcaaccgtcgcccctgatttggcaacaaatgtgaggtcgtcggtggctcagaaccctgaagttgcaactcgaccccacgattccagtggcgtaatcaacggaaacgcaagtgtcacaggccagagacgggagacagctgatccgaagaacagttccgaagtcgccgcctcccagctaagagcgaccctcgcgcagacttccgccgacacttccggcagaatcgcgcgcgtcaagcggggacatggcgctacggagaccaaggtgacgcaggatgtcaagctcgagcctgtgtctctggggaagacgtcggatcccaggaaaacagcgacctctaaggcctcacaggactctaaaacagactccaagcgctctgcacccaagaaacaccagcagcagcagaagaagaagcgtcaggatgtcaatccaccctcggactcagacccaagctccgattccagcgatgatgactcgtcctctgagagttcggatgacagttcggacgggaaccctggggttaacctgacgacggcctctacggctcaagctggcactacgctcctgacgttccgaccgtacatcaactcgaatactctgggtgagttcgatactaaggcgtcactcagggaacgcgtacattggtgggagcattttgcgaacatggcggctcagagaggttggtctacaaagatgcgaattcaggaactcaagttgaaagtctcgggagctgcgcgtgactggttcaaccagttgtccaaacacactcagcgtgactggaaggagttggcgtctgcattcaggaagaagtactgcaaagcgcggggtggggacccagtacgcgccgggctgaagaaggccccagagttatgtgttctagtgtatgtaggcccggagctgagaacaagaacccaagataaccaacaatgcatgactactttgactcaggatttcatgacttcccctgaaaatcagcatcctgaacaagcgaacgctgggtcggtgaactctgaaggaattgtggagtacaagctgaaccctggagagcgctacggatggtgggaaaacaatgatcctgacccaaagaaacgtgatgtggcgatggtgcatggtgctgtgaacgactgccggacgagagttctcctggataccggtgcgactgtgaatattgtgagcttcgacttagcgcgtaagctcggactcacactcaagtcgcacaagcaaaccaaggtgtaggcgttccgacgtacatcggtgccagtcctcaggtgaagattactctcgcttcgagggtgatatatctcctggatgtctggattgctaacatcggcgaagggatcgaagttcttctgggtatgagtttcatgtttgcagctggagtgaggatcagtgttcgcgaaggtctcgtgacacttccggatgaagaggcgatcatgatgtccagaggatcgcctgggtgtcgacatgcccgtggaaaccacaggtagttggtacctgacccctggggaatccaaggtggtgaagatctcgtatgggccgacgaacccacagcgtgatgttgtgtgggcaggacgaggtgaccgctgggtaacgcacctgatttacgctgcgagatcctggccggtcgccgtgaaggtggtcaacatctcggacaaggacgtctggattcacaacagaacgccagtcgcccgaattgtggagtacggcttcttcccacgtgccggacgctttgtgcgccctggttcgtttgcgtatcgggagtggcagacgcttattctggagagtgttcagtcgcgtgagggcagacttcgggcgggacgcctggctgcgcttaagccatcctgtgtcgagaccccagagtatcaatggcctacgaagattctgccgcgacctgcaaagggccccgacatggcactgcttgcctcgattctcaggaaaccgaagcctcgtcacgtgcgcttcgctgaagacgctgcaactcagactgaaggagtgcctcctgaagaccctcctgaactccgagatgttgttgttgatacgagtgacttgggtgacgttctgaacgaggcggtgaccgatgttgcctcgcagactgtcggaaccccagagggcatgagtcctgaaggtgacacggccgctgaaaccctgagtttacaggttgaagttggcagtgattctcagggtcagtggtgcgacgaaggtgattctctgggattcgatgtggatgacgacgattctcagggtgctgtttaagattactgggatatcctgatctcagggatgccgggaactccgttggagaagctgaagcaggaatatgagcgctgcatgcggctatcgacagaggacctcgactacgagcctgcggtctacatacgtgaaggaagtgagttgctctctcagttgcgtgaccagttggttatgcttcctgagatgcgtgaattgacccctgagtgcaagatcgaggaggcagatgttggagtccctgggaaaacgacgcccgagatggaagaccaagtgaggcgaattctggaatatcatcggaagatcttcttggaagacggcaatgcagctcccccacctgcccgtggagtggtttgtgtcctggatgtaggcgacgctaaacctgttgcccagcgtccaaggtccattgcaccacacctgtggactaaggtgtatgaacttctgaagaagcttctggagaacgggctgatcaagacttctacgtccccctgggcatatccaatcgtgatcggcctcaagaagaatggcgtcgacatccggatgtgcatcgactatcgcgtggtgaatggcgtcatcaagctctcacactatccgctgtcgcttattgatgatcttttgattggctttgagtcggcgatgtggtttatgagcttggacatggcgagtggtttctgggctatcaagatgaccgagagagccaagttgatctctgcgttcgtctatccctatgggcactaccagtgggtcaggatgccgttcggcctcaagaacgcgccgctgatctaccaggcagttctcaataactgtctgtggggatttctgcggctttcccctgaggaagaagctgaggtcgaccaagatgtcttggactttttagggttgaactctgggaaacccagagtttcaggtgcaaatgcaccgcgactttcagtgttgacggatgagatgactatttttcagcgtaacatcccggctccctctcagatgggccctgtcctgggtcgaagctcgtatatcgacgacatcgcccacggtgcgcctacttgggagcagctgtgccaggatctgaacatgatgctcttccgactacgttactggaatatctctgtgagtcttcccaagagcgaactcgggaagttgtccattccgtacctctctcattccgtacctctctcacgagattagtgctgagggcatccgagcgacccctaaaatcgcgaagggggtccaagatttgccgttcccgacgacactgaaaggcgtccagagtttcatggggagtctgaattactacaacaagttcattgaagatctacccgtgatcgcggccgtcttgtacgagctgactgaggaacaagtgaaatccaggagagacctgtcgagagccgaggaagcctttgaaatcctgaagcacaagattgtttcgactccgttactcagacatcctgatcgttcaaggcccttcgtgattattccccacacgaacccgtgggcaacatccgctgtgttgggtcaggagtacgacgggattatcacccggtccgattcacaggtcgcgtcctgaatgacgctgatctgcggtatcacattgcggaaaaggaggtgattgctatcctgagggtcctggaaatgtttcgcactttggttgaaggcagccctaagatcgtcgtctacacgcgatattctctgttgaaatggttgctgacatctcagtcggcagacggtcgaacggtgaagtggtcccactggaacctggagatacgcagagttcaacgggatgaagacggcttggctgcaattctaggtgcgggtattgcccccagagaacacttggatgagatcgctgaaaacctgatcccagcctaggggcgcgttaaacctccagtgcctatcagtatggaaatgctggaagcggactatgaggggtgtattctgagtttcgatggcgccgctgagacttccacgcgacaagggagctgtggctgcattctgtggcatgtccctggttgggaaatcctggatgcccagggattcatcctggaggacgtgactgtgaatgacgctgagtatcatggacctgtgaagggctcactctggcgattgagcgtggaattcaggacatcgttgtggttggggactccaggattgccatccagcaagcccagggtctcatcaactgcaatcagccgaatctccagaggaagctggccgagtatgaagagctgaagacgaagttcaagtctgtgcggctggtgcatgtcaagcgagagtttaaccaagccgcagactacctgacgtctaagaccctcgcgcttggtgaatcctggaaggtggaggatgctgacgaacgaacacatctgcagttggtgtccaagattcacgagaagttggtaagaccgaaggtgttattgaacgttggaattcaggggagtgattctcagggtgtcgaaactctgggtatccctggacctgagtgcgctccgttgcctgtggcggccaaagtgtttgcagtaatgactcgggcgcgaactcaggagatcgaagcccaaagcgaacccatgggacctctggagtaccaggcggaacgctggcgacgcatcaaagtgcaccaggacaaagatgatcacctgctgcaactcaaggatttcctgaaaggagacacgacgaagctgtcgcacgctcaagccaggaaactcgcgaaggtcgctgatgatttcgtgttggattccagagaagtcctgtaccgcttgagtcggtctaccagagatcgaccccgagacatggttgacaaactcagactcgtggtgccgaaagctctgcgaccgtatatcctgcattaccctcacgaagattttcagggtgggcaccaggggatcacgaggacgtacgagaagctgcgctctgagttctactggcacggcatgtacgctgatgtggaagttttcgtcaaagagtgtgtggattgcgccagcggcaaggggcgccctcagaatccagggccttcccctgggaacatcgaaccgaggcgcccttttgaagttgtgtctatggattttgcgacacacttgcctaagtcggaccgtgggaacacgttcctgctgctttttcaggatgcgttctcaggtttcgtcatgtgtaaacccatgagttccaccacggcgcaagatgtcgctgaagtgtacgaagagcaggtcttcaggagattcggcgcgagctcgatgctgaggcacgaccaagacccaaggttcatgagtgatgtgttcacgcgcttccatgaacttttgggtagcaagcagcgagccacgctggcgtatcgcccccaagcgaacggacaacaggagcggtcggtgcagactgtcgtgcgcagcattcgagcgtacattgctgaggcagaccagagtgactgggacgaccatgctgagcgcctgatgtttgccctgaatacatcgttcgatgccactcgcctggacactccgttttttctggtgcacggctgggacgcacacggcacggtgtctgcaatgttaggacccaggccctcgagtatccaggagcgcactgcgtacaagtggcgcaggaagctacagcgtggctatagttatgcacaagcttgcgctgaggatcttcagaagaaaaccaagcgcgcgcgctctgccgaacaaaccaggaagtggagagagctgtccgaacgactgaaggcaggattcgcagccggtgatgctgtgtggcagtatataccaaaagcgcagagtcgcaaactggctcacatgtggcatggccccttcagaattcaggaaatccatgacaacttccgcgtgaaactcagggtcaaaaacacaggatatcgcgtgaatccctgggtacacgtgagccgtttgaaacccagagcactattcccgaagcggcccactgtggagatcgacgtggacgaggatgatgactttgatgcgacgctgttgcctgaagacagttgggagcccgacgctgcgaacgatgagtacgaagttgagcgaatcctggatttgcgatggactaaacggactcggacagcgagacgaattcgtgcgtaccttgtgaagtggaaggggtatgatgagaccgagtggctgcctgtgtcgaagctcaactgtggtgccctgctctacgaattcaatcaaggcgcaagagcgcgggcccgtttccaggccatgcaggctggagatgatcacccaggagtctagcactctggggtgacaatgacccagagttacacgtgatattcaggggagactctgggtgacactgtaaaactctgggaaaaatcgacggaatatgtgaatattggagacggaaaacgtgaatgtgatttgacttgatttgattatggagaaggggatactgctgaggctttggcagtgtgtgagaaggaagatgaaggcggcgagctctaccggcagtttccagtgcggggggcgttcagggaccaggaagtcagggggatcgacctcctcctgccgaagcatgcctgcgaagatagtctcctgacgtcctctagcgtcgcgtatcgtggtaacttgaactcaggggcgccctccatgtccacgtccggagccacgtcgcctgcgtctggagccttggactctgagttcgcgtcaccagtttcctgggttgcagcgtcagtcgaggcgttgccatcggcctcgcgcatgtccgcgtcggaggtcttgccggtggcgctggagaaggagacgcgcttggtcacgcccgtcttggtgctgcccgtcgaagtgtcgccagacgctgagtcacccgtctggccgctgccgccgcctgctgatgcggtgctcgcaggggcgtcgccggtgcgctgctgtgtcggaggtggcgcgctgccggggagcgccgtgccttgagctggcgccgtcgcttgcttgccgtccgaagtcgtgctctccgccatgttgaatatttgcgaaatggcgatgtgaccgcgcattgcccgttggagtttttgcgtttgagaggagaaccttgaagataggtcctgaccacccgttggggagacagggtgctgccaaagtgagtgaaaccctgggagtcgacagagtgcaacggccgtatcgaggtcgacggtggatagacctgtgtgtttttgtggcctggccatggttcaccagttcggagcgatttcctctttgatggacccggaccaggaggggcggttgacacgaggcagtccacagaaaatcgccgacgatgtgccgtcacctctgtgacctggagtttgtatcagatgatgattgctggatgacttggatacggcgcggctgtacccgtgtgacatggatggcgactgtgggagagaagtgatttctcgggataaatccagcgtctgaccgcagatgggcccaactggctggaagtgtgaatcctgggagtgcacacccagaatttcagagaacactcagtccagccgcggactttcccttacgatgagtgcctaaagtctggcggaaagtgtctctggagaatgtatcccagagtacgcctcatcttgctgtggctcagagtgccccagaggatcaaattaccctgagaatcaacccactactaccatgatcatgcgcaggaggccactaaacccactaaaagtgtggctttgaggagatacacacgagtctgcactgcagcagacttgttacccagagtgccgcacggaaaacctagagtgccgcacgatgacccagagttcacctccctgagtgcaggtgacccagagttccaaagatgattccctgggtttggaccataaatccagactctctatactgaacttaagtgtttcccgagccaacacccaagaatccccacagttccccaagattcctcagaattcccaggatttcagaagatgaccctgagtgtcacctgattttcagggattcgagtcagttcgaagccagtctgcaatcaaaatgatgcgtgaccttgaagaaccgtcatggatgcacagactggatactttcgaggagtcgagagggagtcctgcaccatactaaaccaagtctaaggacccacaattggcactttcgacgccgtgcgacaatggattcgcaagccgatcgcaagattggaccgctgatcccaaggtatactcaagacaagacattttgaccccaagcatagtgaacagaagatatttgcccgaagaagagagagagagagaagtagctgataaaaaccaaacagagttcattttaccctgtactgcgcaagtgacttcggccaagcctgccgacggaaatccgaaggacccgagactacgaccgcgggacgctaagggcacatcaatggcgaaggacagccgtctgtgtgggctccatcaaactcaagtccagttaggtggtgaccagcgacggccttgagcttcctggggtgatccatctattccatatcctagttgggtcacttgctgtgctcgtggtagcccatttcatattattccagagggtattctggggtgctaggtagtcgcctccaggattttgtattgactgcttgtgtgaagggaaggtaactgatagtgattatattttcctcctttattggaggtggtgcgcgtttgtgtgagtctcaggggagctaggcccctgaatttcagactcgagtgagcctagtgtgtgtgtgacccaccgtccaagggtccaaaagaataagtgacggctagttgtagtgattgtatactctgtatttgttggttttatcgagctaggagggcatttgggtaaggtgtcttctgagttccaagtcccagagttgactgaaatcctggaccctgaattcgtgatattctgggtttcaggggatctgattctctgggtttgccttttggtgtggaggtgcgttctgaagtagacgtgcgctcccgcacttcttcgaggctacattttcaaccggtggagtgccgttccgtcgaagacaaacgagccgacagggattacacaaggtacccacgccaaccaaggagtgtgattcacagggtttaaagcttttgcggctgcgaatctcggggtctatcttcttgctgttgactctcaagtcgactctctgggtctacccctggggaacagtcttgggctgcgctatacgaacccccctgggcgacaaaggtttcatcggcctcgcctcacaaaaccgtacaggtgtaaggcgcggaagtacccacctgacgttcgtcgcttcatggaggacttcaacaacaggttggtgaagttagggtgggtgtacgaaaaccgagagaggagatgggcgtgccccgctctacctgttcggaagggaggtggagaattccgccaaacggcagactacaaacctataaatgagctggtggaagcgatcgtagggatcatgcccgacttgcagacagacctggaagccgtcaaaggggccaatttctttggcttattcgatttcattaagggatattggcagatcgcgctcgcagaagagtgccaagagatgttgtcttacatgactcatcagaaggtgtacacgccaagacgggtcccccaaagatgtactgatgctgcgctgttttcccaagctacaatcgagaagtgtttggaggaacttttgcggcgcctttaacttgtgtggatagatgacttgctactgtagacatacctagtcaagttggaaagattgtttgaactactcgattttttcggctttaagctcagtgttaagaagtctcggctcttcaaaaaggaagtccgctggtgtgggaagatcatctcaggctccggtgtgcgtcatgacccagagcgcatccgtgccctccgaggcattccctacccaagcacggcgggcgaattacagcaattcttgtgcgcaaccaattggatgcgggagagtctaatagactacgcgagaacgactcggcctttgcaggacgcattagatgcagttttggcgagtgcagcaaagggaaccaaacgggctgcagctggaattgcaatcagtttgactgctgaacagcagaaggcctacggtgaattgaaactactacttgcaaatagtgcgacgctcgcatttcctcgcgagaacgcaactatgtgtgtgatgaccgacgctagcgacatcggatagagcctggtagtaacacaagtgctggattggaaggctggcgagcccgtgcaccagcaacaacatcgactattgacctgcttgagcggcacattcaccggctcgcagtgacattggagtataatcgaaaagaagcgtatcctatcgtctgagcttgcgataagttgagctacctattgctacgaccgggtggatttaagttgttctgtgaccacagaaacttgatctacgtatttgcacctggcgcagaagtaaagaaacatattcgtgggaaattgctaaggtgggcaacgaaactagttgagtaccggtatgaaattgaacatatcgacggatcatcgaatgtgtggagcgacatggtctcccgttgggcaggtaaccacgctcaggtaactcacctacggcagatgacactccgaaagcgcgctcccgcgacagctaccggtacaacagcacctcgaaaacgaactcgacgaggccgcaagcgtgcagccccagtgcagtcaactacggatactgtactacctacaccacgacccatccggtcattgaatgacccggatttcgagtggccaaaccgcaatgccatactccaatcgcaaaatcggcataagacgtgtcgaccagcagaggctactggcagtgtaaaagacgggtggtgtactaacggcaaactatggatacctgatgaagacgagggccttatccaacgcatcctagttgttgcccattgcggaccgcaaggacaccgtggtcgagaggctactatggagtcgattaggagatccgtttacctggttcgcctgtgagcacgggtggagggattcctgtcgacctgtcgtttgtgtcaccacgtgaaaggcagcaagattatccaaaggccatggggtgaaacatacaggaccaatgagcgaaatggagcacttcactgggattttctgtcccttggagagagtttcgccggtgacaactatctactcgtacttaaggatgaagcaacgcatttttgcgaattgacaccttgctgcggaagccatcctcgcatggcacagcaggtatggcataccgccactgtggatcagcgaccaggggtcgcacttcaaaaatgcagttgtggcagaagtgtgccggcgactgaagtcacgtcaagaattcacgttggcttacagtccgtggatcaatggcagcatcgaacgtgccaaccgtgatattatacaggtgctgtgagcactctgtctggaatatgaggtcgaattacatgattggacatatttcgtacctattttacaggggaatctgaatcacaccccggttccttctctgggtaacagagccccagtggagattttctgtgggttgccgctgccgtcacctttggacttttgtgtggactcgaggcagcgcaagattctatccctaccagagcaaccagccgacatcgagctgaggcgaggcgggtgaacgcctgaccgcccaggtgtatagcttggcgagtcccgggtgtagactcccgaatggggtgcacccagaacaaaccctagccagagatagtacacctagatgtacactccaaccggggtggcgtgtgtccttgtgaacaatccctgtgggttcgtttgtcttcgtaaccaggggtcttcaaccgtggatgagttgtcttgatacttgtaggtcgctaggtagcagggcagaacgtaaccttcctggacgtcgcctctgacagccctcagacaaccaaacaatacaaacagatacagagttatatacaagcacgtagcccttccttattcttttgggccgtggaagggtcggtcactactccagtcaactccggccggactccgggatactggtcaatcccggtcggctttggctcacgcgcaccaccctcaagtactgagggaaactaacacaatcaaatacctcctatcacacaatagctcttaaatcaatactttccaaccggggctactccaaccggggtgacaaggtaatcggtaatatgaaatgcggggccttcacggtctggacgagctcaaccgcaacatggaaatgaaatgggatggatcaacctcgggttgtcgtccggtactcaccccaacttggactggacttggttgcgggagctcgacccagatgtcacagttgctgggccctcacgcgtagacttagtcggtcctccgggaatgcacgtccggtaggctgctccaactcacttgcgcgatccttggcaaaacgaactctgtttatctgttatctgtggtctctctctgtctgtctttacatgcattccatcttgacttgtcttcactatggtcttgtcgtcgcagtcgtccgcggtccctcgtagcatacttccagcaagtataatcatcactgggtacgcaagtgaagttcaatgttccacggaatccgagcagatcttggctggtcggcttggtcggtcggaaacattttggactttgtattctggatcttcacatctgggatggtatcttggtatcttggtatctccattcgggattcatgattatctccaaacgggattacactccacttgggcttcacatccgggatgtcttggacagcttcacggtttctgggtcttcactcgatccggtcgggctcctcttgcgttgcacagtgcaccaagagcaggcggcctccagtcggaggcacttctacactccacttgggcttcacatccgggatgtcttggacagcttcacggtttctgggtcttcactcgatccggtcgggctcctcttgcgttgcacagtgcaccaagagcaggcggcctccagtcggaggcacttctacgctcccttgggctttgcctctcgttcggtacttggttccagccggggtccgctcttggggacatctccatcctgggtcaccaaaccttgtacactgccaacgtgagtccggccgggatccgcttttcccatacgccacgtgtcgctgctccccccccccctccctctcccatagtgagcctctgaaccaaccaatcacaagcgcagctcggggaatcctcgaaaatctccaattccatcgtgtcaaccgcccctcttgttacgatccattgtagagtccattcggcgaaacgatcgatcatgacaagatctcacgatccgagcaagcccagatgggtgggcatcccagatggggatgtcttcagtcaactcccaactgtggtgtctcttctttgcgccctgtcccaaccgggtcgcttttcatcaatttctctttccagtctgcggcaacgaaatctccactcacaacgaaatctgcgcgccgccgctcacaccatggacgcccccgcatcgagcaccgacgcgccgcttatcccagcgcaactcccgccttctgcgcctccagtgggggggtgcggaggcgggcgcgggcaacagcggcggtagtctggctgctagcggcgaggcccatgtgtcggtcaaggccggcaaccctgcgcgcaaggccgacgagcaggagggtaccggcaacagcaacgacgtggacgaggaggaagaggaggaggaggaggagagcgcggcgtcctctgcgaagagctcgcctctgcacaccagcgaccagcccgtccgagaggacgaggccatggaagaagctcccatccgggatcctctgcgcgagcgcacgccaagcgtcacggctgcggtgtccagcctgctgtcgttcgatgaggtgatcgacttcaaggcgtctggcatcctctcgtcaacccatccgggatctcaagaagttgtcaacatcctgccttcacgccacgttctcccgcccaagcggcctggtgacggcaactcccacctggtcggggttcctgcacacccattggcgtatcagtcggagcgctagggtatggcggcacggaggcgttagcaatcttcgacggcttctccgcccagaacctccacgacttgggtaacctggttgacagccagacggagctgcgcaataacttgctgcgcccgcatgccaaccgcgagtctcccaggctgtcgcagctcgagaccactttgaactcgttgctgtggcgccgggaggccgcctctgtgctggcccagttcccagccgggtgcttcgcggaaaagttgttcttcacgacgtctctgcttcatcgtatcctcgaccgggcacggcgtggcgacatccccattcaagggccggttgaggtatctcccggcgggggcgccgccctgcaacagcgttatgacaggctgttatgacaggcttgtcgacgagcaccggttcctgcagatgtatcaccagcgggaggtggctgcactccgggcggagaaggtggagctccaagcccagctggagaaggacttcgccttggaggcgcaaagccatctggatgaggaagacgcgctgcgcaacaaggttaccgaggccgaggccaagctcgagcgtgcgatcttggccggccagcgtctgcgggtgaccagccaggaggatgcgtttgacaccgaccggctgatgcggttcctcaaccaaggtggggctgccactcgcggtcgatggtccagactggtgcgtctgctgcggcacttccaacgggggtccacacctcctgcgcactgagtcaccaacatcaccgtcgaggccgctgatcgtccgttcaggatgatcccaccctatccaggcccagtcgacccggccgtcgaggacgataactaccaggcgggtgacggcaacagcggccaggacggcgattgtgaggagaagtcggaggacaatccaccccagccactccgttcggacttcccgtctgcagatggatctccgtccaaacccaagcggcgtacgtccaaggggtctcgttcggggtcgtgcccacgtggcatggccgagctttccggcaagggtgggccagtgtacgtccaaatgcgacccacggtccacctggggtctgatgtgctccctctgtcgccccagacggacttcaagcgtctgattcctgactgcgctgcgtccctgccggagttcgtcccttggtcggatgtccggttggatgtccagttcgtcatgcggatggaccatgggtacgaggaggccttggatatcctccgtcaggatcgtccggcccaccagtatttccttaagccttggcttctggagatgctggtcaagatgatgtaccatggcaccctggacgacactccctggacgcggtacgtccccgagaccttctacaagatggctgaggtcacgctccaaggacgtctccggtcgggtatgtaccccgaggaatttcttccactgcgtaacctggctgaagatgctaccgccgagatggagatcgtcgaggtcgatgactctagtgagaccagtggttccagcgactccgactacgaagacaaggccaagacatctacgtccaggaagggcgcagatgggtcgtccaaggcggagtctatcgaggacagcagttcatctaacagcgacactgatgaggagcagccagccaagcccaagcgcaatcccaagcggaaccgcgtcgagtcatcttcggacagctcgtccgagggtgaaccccagtcgtcttcctcgtcgcagcgtcggtctccccggttgtcgtcccagaaaacgcctcaatcccatcggtccaagtttgcattgcaggacaagcccgaccggccatcatccaagaaaaatcccaagaagcgcagccggacggcgaagtccaagcgggagggtggcaagtcgcccctggcacagaagtcctacgaggagggaattggcgatcatcgagaccccatttggggacattgtctcgtggcgtcgtcgtggtgtcgacactcgtttctctccgaagaaaggtgacatcgagggccaggcgtctgggtttcctaactacgcacctcagcagcctgagaccaagtacctggccagacgttggcccgcagtcgaggatgagtatgcggccctggtcgaaaaggaaccctggctggagatgttcaacagccaggtcaaggtcatgtacttccaccgccgagaccagttatccccggccgtgatccgcatattggaccagcatgtggagtacatgaaggatcacctcccggccttctggcacattctacattggttcatgatgaagaccaagccggaggacgacgagaagtgcgacgacctcacgatctacgaacgggctcaagaccttcaccgcaagcgccaggcgttccacgacggggttgcgcgcaccttcgaggcccgcatcaagcgtctgatcaaggccggcatgccaaagacgatggtctgggagccaggattctggttgtatctgctacctgtatctggtcgacgagtcaaccaagaaggacgatggcacgcgttacaccctggctgaccagatcgcgatggccgaactcgaagaccccggccggactcagtggactaccggtacggatgacgagcgtctggcgcacgtcccagccaagatcgtcaacaagatgctgctcccagagcacgagtgcgtcgacaactgggtctcgaccaagttccagtgaagtcatcccatccagcatccacagcggtcccggatgtagttacatatccgtagcgtaacactttaattctacaatcaccgttaatgtcttcgctgtcttcatcgtttccttcttcggtcgggttatccaggtcggttcaaccttgagcgcagtcttgttcatctcttgtggctttggcacctccttcagggcgacatagtcaacttcatacactcgccgtcgagaactccattctcgctcgggttactctccataatcacaactccatcgtagatccgctccatacaaattcacaatcaattttccgtgattcacacattcacatccaggcatctcgggtcttcgtctgggaatctccaactgggatcaatactcccaactggggtcgccccattcggacttgatcactcccaactattgtatgttagggtggtcgtccccagcctgcatggcttggaaccgcgctcgggcttcgccccttgattgaactcatacaagagcgctccgcaattcagctgtgccatcggtatccattcaggctcatcataccccttccatttgatgagatactctcgtgcccgtttggacgtccgcgtacgcttgtcccacctgagatccatgatcttctcctcttcgtacgcgtcattctcgttgtccgcttcccagttgtcttcgggaagaagtgctgtgtcaaagtcatcgttgtcttcgatctccggttggattataggccgtctgggatacaacgcccgggttttcagtcgactgatgtgaacccaagggtttacacggtaacccgtgtcctcaaccttgagcctcacccggaactcgtcaaccacttcggcgatcctgaatggaccatgccacaagtgggccaacttgcgactcagacccggctgcacttttgggatgtacagccagactgcatccccaacgttgaaacctgccttgagccggtctgacaactcgttccacttccgggtttgctcttccgagcgagcccgtttggccttcctctggaggtcttctgcacatgcccgagcgtcaccgtagtcccgctggagtttccttcgccactcatacgcggtccgttcagggacactggagggtttaggccccagcatagctgagatcgcacccttgacgtcccaaccgtggaccaggtagaatggggtatccagccgggttgcatcaaacgacgtgttgagcgcgaacatgagtctctctgcgtggtcatcccagtcgctctggtcagcttctgtgatgtaagcccggatggacctcaccacagtctggacggaacgttcctgtccattcgcctggggtcggtaagccaacgtagctcgctgtcggctacccagaagttccctgaaccgagtgaagacttcactcatgatcctgggatcctgatcgtgacgcagtagggagatggctccgaagcagcggaaccccctctcctgatacgcttcagcgacatcctgagcggtggtagaactcatcggtttgcacataacaaaacctgaaaacgcgtcctggaacaggagcaagaacgtgttaccccgttcggacttcggcaaatgggtcacgaagtccatcaagaccacttcgaaaggctctctgggctcgatgttcccgggcgaaggtcctggattcggcggacgccccttgccactggcgcagtcggtgcactccttgacgtatctttcaacatctgcgtatatccccggccagtagaactccagccggagtttctcgtgcgtccgggttattccctgatggccaccttggaaatcctcatgggcgtaatgcaacatgtccagacggagtgctccggtacgactaggcgcaactcgtcggtcttgccgcgaggttggtcccaattggtcctgaccagtcgatagagtacgtcccgaacacccaacgcaaataggtctgcccgcttggacagcttgcgaatctccagccgggaaaagtcatccaggtcgcccttaaggaacttcttcagattcaccaactcgggatcaccgtcctggtgcaccttgatccggcgccacctctcagcttgatactgacgtgggttcataggatcaccccggttggagtcctcgcggctctggctacgagttaatgcggccatgaccctggctgccattggcaggggagctgactccggcccgggaccagcatcattcggcactccagtcgtagattcccgactgggttcgtcggggggatcgtcgctcggggccacttcaggcttcatgatctgttcgtggatacgagagactcgccccagatgttccatttcgtccgggtcatttatcgcacaggactctccgagcgccagtgtcttggacgtcaagtaatctgcagcctggttgtactctcgcttgacatgtaccagccggatcgaggtgaagttccgtttcatctcctcgtactcggccagacgtcgctgcaggtttggttggttgcagttaatcagtccttgagcctgttggatgacgatccgagagtctccgacaacaaccacatccgggataccccggtcgtggatcatcttcaacccattcaggaggccgaggtactcagcgtcgttcaccgtaacatcatccaggatgaaaccccgcgcggccaggactttccagccggggagctcccagatgatacacccacaacttcctcgcctcgtcgatgtcttcgcagctccgtcgaaactcaaggcgtatccagcgaaattagcctccagcatctccacactgatcaccggtgggggtttcacttggcccttggccgggatgagcgactcagcaacctcgtccaggtgctcacgcggcgttatgccagcgcccaggatcgcggccaggccgtcttcgtctcgcttcaccttctgcacttccaagtcccaatgggatagtgttaaccccaccggacatgtcggccgtcggcggtcttagacttcaacagccaggacagtactgaatacctggtgtacaccttgatcgggcaaccctggacgagagtgttaaacacatccagaactcgcatgacagcaactgcctccttctcggcgatgtggtatcgaatctccgcgtcgttcagtacgcgccccgtgaacctcacaggatggatcactccatcatactcctggccgaggaccgcgcaaacggcccagcggttagcatgcgggataatcacgaatggcttggtccggttggggtgtcgcaacaggggtggcgacacgatcttccgtttcaagatctcgaatgcctccttcgccctggacagatcccggccggacttcacttgatcctccgtgagctcatacaggactgcagccacaaccgggaagtcctcaatgaacttgtgatagtagttgaggcttccgaggaatgactgaactcccttcaggtagacgggaacggcagatcctgaacacccttcgcaatcttcggagtcgcgcgcagtccttcggcactgatctcgtgggagagattcgggatactcaacttcccgaactcactcttgggcgggcggacagagatgttccaatagctcaaccggaatagcagcgcattcaggtcctcacacaactgatcccaggtgggcgccccatgcgcaatgtcatcgatgtaggaactccgtccgaggacaggtcccatctgggacagcatcgggatgttgcgttgaaacacagtcatccgttccaccaggacgggaacactagctccagccttctcccgttcggattcatcccggacggacgggtccaaaccgaggaactcgagtacatctgggtccacctgttcttcttcttcccgagggagacgcacgaaccccaaaggcagttgttgatcaccgcctgatatacgagtggggcattcttgagcccaaatggcatgcgtacccactggaagtgtccgaatgggcagatgaacgcggagattagcttcgcacgttccgtcatccggaccgcccagaacccgctcgccatgtccagactcatgaaccacatagcggcttcgaatccaatcaggagatcatcgatcaggggcaacgggtagctagaaagccggatgaacccattaaccactcgatagtcgatgcacattcggatgtccacgccatccttcttgaggacgatcacaatcgtggaagcccatggcgacagcgacatctcaatcagacccgtttccagcagcttcttcaggagctcgtacaccttcatcatcaagtgaggggcaatggaccttggtcgttgagcaacgggttttgcgtcacccacatccaggtcacacaccacgcccctggctggggccgcgcagcattgccatccccaaggaagatcttgcggtgatacttgagtatagagcgcaacttctgttccccatccggggtagtccgcccgggctctccaacatcagccttgtcgatatcacattcggggctcaggtccttcagctcaggaagcaacgctaattcgtcacgcagttaggacaacaactcgctcccctcgtgcagatacactccagcttccaggtagagctcctcctggttgattcgcatgcatcgattgtactcttcctccagcttccgcagcgaggtactgggcatcgacgcagtgggtatgtcaggctcttcccggtcggagatatcctccgagcggtcaccatccaggtcggactcggccagatcagagatgctcaggttccactcaccagaactcggatcggactcagctgtagtgccgacaccgctgtgagtatcttcgacggtcggacgtcgaccggattctgcttccttataatctccatctgagatgccctcgacagatcccgcccgggactcagcgttaccctgctggagcatgaccagccggtccgtccgggatcccgattcaggccgtaggagaatcctggttgaccattcacgctgtggtctttctacagctggggctgccgactccactcgagctcgatctgctcttgctcccgtgcctctgcttccggagacattgtgttctcgtatatcagctgttgccactcctgataccgcttgcttcccggccggacaaatcttccaaaccgaggaaaatgcccaaactcgacgatccgggccacaggagcccggttgtcgatccacactctctgcttagagatattcaccaccttcactgaggatgcccacgacttggtagcatacaggatcttggtgacccaacgatcaccccggccggcccacacaacatcccgttgggggttgctctgaccgtacctaaccttcacgatcgcatgttcgcccggacggagatagatcccctcatccggggttaccgggagatccaagcccactttgtcgcggtgcggaccgtcacacatcacaacagtttcttcgtccgggagctgcactagtccttctcgcacgctcaaccgcactccagccgcatacatgaagttcatccccagaagtacttccaatccttcgccgatattcgccaaccagacactcatcacatacaccacgcggaatcccagagtgatcttcacccgggcgtacgacgtaatgttggtgggagcacctcctaatccggacaccctgatcggctccggcaatatccggaatttcagcttgagcctacgcgcaagatccaagctaatcatgcttccagatgcaccagtgtccaagagtatcctcgttcggagatcgttcaccgccccatgcactgtcgccacttcatgactctcttcaggctcgtgatcctcccaccaaccgtatctttgtccgggctgtaggatgacttcgacttaatcatcgccatccgggttttcccgtccaggtttcgatcagttggggtcgtcaaactggtcctgaaatatagctgacatgcattggtggttatctggttttctccttctcaactcgggtccaacattaactaagacacacaatcctttgggtttcgccagcccggcgcgttctggatccccatccagcgggctcactagtttaacggcgaccccggattggcctcttcatccagcagttgcttgcgcagggatggaggcaggtattgcaacatccccttccgagcgagtttcttcgcgacttactaggcgtcgtaatctccacaggtcccttcatgaatcttgccacagcgtgagcacggcttcactcgacacgcgtatcccggatggcccttccggttgcaccggtcgcaaacgatctccgcccagcagttctgctctttgtggccaaacttgaggcacttctcgcaaaactcgttccggttagggttttcccgtcggggcgactgccatccgggccgaggtgattgccatcccggccggggcgactgccaccctggacgggagtcgccctgcgtaggcgggcgccacccactctgctcgatcgccttgaagatagcctgacggagttcgggctccgggatctgagcaacggttggagcacttggcgccacctcagccggggcactccggctgggctccttcgactccgcttgggacagcttggcttcctcgacttcatcctcgaaacttacacgaccttcagattcgcagccggactccccgtccgaagttgccacaaacgcacggtgcctcggcttgaaacgggaatcctggatgttgcccgctcggaagtcccgcctgggccgtggcgtatcatagcccccatccaggttcaggtcctcctgttgctccaggatgtcttcgaggtcgtccaggctgcggatcttctggttagccaggatggccttcagctgggagtcccggaggttcttcaggaaacgcttgacatgttgcatgcgctccttcttggacttccggtacttgatccccgccttgaccgcagcctcgttcagcctgtagaataactccatcggggtctcagacgtcttctgtcgcatggaataataccgttcagactccgacgtccggagcttcaggtacttgcgacggaacacctggacgaagcgcttccaattgctctggacgtgcttctccagttggtcgcgccaattccgggcggcaggtgacaacttcatcttgagctctcgaaccttggtctggtcggatcaaccaccctggacggagatgttggtgaacttctcccaccaggtacgtctatctccaagcggggcttctcatcgaactgacccagcgtgctggagttgacatacgggcggaacgtccaggaggtcttgccatccccaaccgtagttgactccacggtcggtgtggcgtcctcgtcgtccaggctgtcgtccgggctggagctatcatcgtccgagctcgaggaactggagcttgaatccggggacgagtcgcgatcccggcggtgtcctttgcgtggcgccttcttgcgatcgtccttcctgggcggatccctctttgactccatcgactccttcttcaccgtcgtcttggtccccggacgggaggtccccgtcggggcaacctgcgtcaccgtagtagatcggcgcgccgcattaactgcggccggctcattcttcaccacgatcggcctcagagtccttgctagacgcgcgacgtcgacttccggcagtgtcgccagtagctgctcccagcctgcttcggtcgtgttcttctgccccggctatgcacctgcgaccgttgcgcttcccgtgattacgcccgttgcccgttcagggttgtcacttccatttgtatgggagttgcccgattagggtcggatgttccccgttcaggttgaacttgggcagatgttgcttgaaggtcgcgtatctgtcccacatggaaacgctggatattctgagcagaatcacgttcctgcgcacgcgcgacttccgacgcctaaagcctggctgccaacgcggccaggtcctgctgggcctgccaggcccgggcggccatctcggcggcgtgcctcgcgtcggcttcagccagctgccggcggatgtattccgcggcggctgcctccacacgctcacgctcggcccgcgcggccgcaagacgagcagcttcgacatcggcctcggccgtcaggggctgcgaggcggcctgggacgcctgggcatagacctcatgcaggtgtcgctcaagctcctgggcccggcgctcggcttcgcgcgcctcccgttgggcttcggccagagcaagctcggcttcggcatcccggctgggatccttcccggtcgacacagcttcgcgaagcttcgacagctcggcaccaagctgctggacctggtggaaggtcgacaccgccatctccgccatccccgactgggccgacaggcttgtccgtccggaccgggtggaccggtacgagcgcctggatcgactcgagcgcctggatggggatcggtctcgtgatgacctccgggtggaacgtcggcggcgacgccgagcatctccatccgagtccgagccactcgacagcgagtcacgccttgagcgtcggtgcgtccgggacctcgtcgccgtgcgtgttcgggatatcgcccggctggacacctcgtccaagcgtgccaagttggcatcagcctgatcggggatcggctctcgtttggggaccacctcgcgcgtcacgtagaagcccacgtctccagcgccgaccgacacgccaaccggaccccgggcggacatcgccaaggatcccaactggggcatcgccatgtgcgacgcagcgctgtacccgagcgtcgaggtcgacgagtccgaggttgtgttcctggacacatacgactcggacgtcgcgccgtaggaagcccggtcggaggtgccaactatgctcgggacagggtccgaagttgcacctctggccggggcatcccgggcggactcctcagccgacggaaactcggacggcagcgactcgaactgggacggcggggacgcaagcgagctctcggccctcggcggcgcatgctgcggacgcttgggcacagactcaccggtggacgacccgctcggactccggatgggacgaagaccagtcaagcgtaggcgtaggacgtaggcccggcccaacaagagttcgtagtcgctcatcaatagatctccatccgcgtcttccgcgtggtaatccatgatcggcggcttctctgtcttcgcttgggcctccaatgctggcaggatcttgaacgtcgctccgacgaccagctcgcgccactcgatgagctcgaccgcaagcagtcgctggacgtctccgaccagggtccggatggacatcggctccaccttggacactcgcatctccacccaggccggcaccacgttgacgaattggaaaccggcctcgaacaggagcgtctgcagaaccgcaacgcactcccgcgagtccagcaacccggttgggatctggactccggccaggtcctgggtagtcgacaagtctcggcggctgggtgccaggtcggccaaccaaccttcggccgggtcctgcgaggccaccttggacgccaggtacttggacgtcacaattgttgcggtcaaccacagcacggagtccgggcgggactctggccaggcgtactccacgttcggcggaagcgtgagcccagaccgggctctctcccaccgggaagcctgcagcgccgcgtacgtcttcgccgcttggacacttgggtgctcggccggcaactccgtcggcgggttaccccggctggccttcaccgagagctgggtctccggttgggcatcagcggccggggtcaccgccttcacaggaactgcggccggcttctcctcctcggcagacggcgtcggcttgggttcggcggacacttgcgcgtccggctgcacatcttggccaggcagagaggagtccgaaactcgaccctccgcctggggctcatccacgtcggcgcctccctctgacgcctggttgggttcaccctgaccgggacccccctctgcggtcttcgactcctcgcccgcgtcagcacgttcgggctcgccgtccttcgacgcttggtgcgcgtcatctgggacggccggctcggatgccgactggactggttcgaagacccatctccggtcagggccgcattccgcttttcagcgttaaccctccgagcattgcgttgaacctcttctaggctcggttgctcctcgggtggcagccctgccgcacgacgcgattgacgcgacgcctctccgcgtcctcgtcctccgcgccctccttcgcgcatgtctcctcgcttagctgtcatatacgccagttaggaaagttagcacacctcacacctataaacttacaacatataaacaactccggtgaaatccctggttcaaatccaagcacgcgcaccagctgaggcgaggcgggtgaacgcctgaccgcccaggtgtatagcttggcgtgtcccgggtgtagactcccgaatggggtgcacccagaacaaaccctagccagagatagtacacctagatgtacactccaaccggggtggcgtgtgtccttgtgaacaatccctgtgggttcgtttgtcttcgtaaccaggggtcttcaaccgtggatgagttgtcttgatacttgtaggtcgctaggtagcagggcagaacgtaaccttcctggacgtcgcctctgacagccctcagacaaccaaacaatacaaacagatacagagttatatacaagcacgtagcccttccttattcttttgggccgtggaagggtcggtcactactccagtcaactccggccggactccgggatactggtcaatcccggtcggctttggctcacgcgcaccaccctcaagtactgagggaaactaacacaatcaaatacctcctatcacacaatagctcttaaatcaatactttccaaccggggctactccaaccggggtgacaaggtaatcggtaatatgaaatgcggggccttcacggtctggacgagctcaaccgcaacatggaaatgaaatgggatggatcaacctcgggttgtcgtccggtactcaccccaacttggactggacttggttgcgggagctcgacccagatgtcacagttgctgggccctcacgcgtagacttagtcggtcctccgggaatgcacgtccggtaggctgctccaactcacttgcgcgatccttggcaaaacgaactctgtttatctgttatctgtggtctctctctgtctgtctttacatgcattccatcttgacttgtcttcactatggtcttgtcgtcgcagtcgtccgcggtccctcgtagcatacttccagcaagtataatcatcactgggtacgcaagtgaagttcaatgttccacggaatccgagcagatcttggctggtcggcttggtcggtcggaaacattttggactttgtattctggatcttcacatctgggatggtatcttggtatcttggtatctccattcgggattcatgattatctccaaacgggattacactccacttgggcttcacatccgggatgtcttggacagcttcacggtttctgggtcttcactcgatccggtcgggctcctcttgcgttgcacagtgcaccaagagcaggcggcctccagtcggaggcacttctacgctcccttgggctttgcctctcgttcggtacttggttccagccggggtccgctcttggggacatctccatccggggtcaccaaaccttgtacactgccaacgtgagtccggccgggatccgcttttcccatacgccacgtgtcgctgctcccccccctccctctcccatagtgagcctctgagccaaccattcacaggcgcagctcggggaaccctcgaaaatctccaattccatcgtgtcagagccttggctggcggcagtgaaagctagcgttcgatcgatgcacaagcctatgatcaatgcacgcgctcagcagaccgagcgcaaccaaaggcgccaccagcacgcgaagaagcccaacttcgacgtgggtgattacgttttaaggtcgagggtggacagtaaacaccaagacaagctactagtgacatggattgggccctatcaaatcacacgagcagactcgcactcgttcacggtgcggcatctcgtcaccggggaggggacagacgtccacagctcccggttgaagttctatgctgacagctcgttgcagatctcagaagagatccgtgagcatgtagcggcccaaggccaaatcctggcgatcaatgaactactggactacacatggaacagcgttaagaagggctacgacgtgctagtgagctggaagggcctagagcctattgaggactccaacgagacggccaagtccctagctaagggtgtacccgcgttgctacgacagttcgcagaacgatgtgatgatacttgtttcgaacgccacgtcattgcactgaccaagcagcgctccacagccgatgctcaccgacccatcgacatgttccatgcacctcgtccgcggtacgacgccagcaaaacctgcagtctcagttttcgacacaacgagaattttcgatattttcgacaaccttttcgacatacattatggacatgtatttttgacaattgacactttgacactcaaacagatttgagttgagctcaacagaacgagcaggacaacttgacccgattgactgggcaaggcttggaagggcggtgtagcggcgggtttcatagaagcaagcccagcccattcatcgggtgacgtctacagaatgacgccaccaagctggcaattaggataggggagaacagcgaaaccaatgcgaccgacagagaggtcggtttggtagaagacgctggcagaaggcgctagcaggagtcgccggcatgaagccgccgacagctaggagcagagacacagacagagatcactttgagatttacatctaaaccatcaacagagctttggtttgcccggaagcgccagcttccctcgttgtgttccgaaacctactacagaagactacgtagtgggaaaatgcaatgcaacctgagtgtaccagctccaacaatagcagactaatgttgggcattcctctcagcgttaagaccctttattataagatgcatgacgtactgcgtacgtggtcacatctcgactaataagctgacacacgatgatgcagattaggacgcagatacgctggaccagaattccgttgctgagctacatggttaaatacaagagtgctgatgctactgcatgcagcccgatagtaggaactctggcaatgggaaggcgatcctgccccagcggaagtttgcgcaggacgaagacttggacatttgaacgttcgtgctattttgcttgagaatagggaatatcatggtggagaacggcagatctacagggcgaggcatgcactgcacgcaataaatcacttgtagaggaggacaagaagacgcagctcagcacttggctgctgtctcctcgtctccgttctgggcttaggcgtcggcttcggcgtcttgtcgactggccgccagcagcgccgggtggtcgagcacctccttcatggtctgcagccgccgggccgggtcgaactgcagcatcttgtccagcaggtccatcgtggcggccgagagctgcgcgtccatctgccaggaccgcagcacgccgcggcagcccacggcccgcaccgtgcggaactcggggctgccgggcgccgccagctcgagcagcggcgcgcccgtgagcagcatgaagagcaggatgccgagcgaccagacgtcggcgaccacggggtcgtagctgccgcgctgcgccacgacctcgggcgccgcgtactgcgccttgcccacgcagccgctggccgggcggtcggcgcgcgtgctgagcccgaagtcgccgagcttgtagacgccgtcgcgcgtgacgaaaacgttctcgagcgacacgtcccgatgcgcgatgttgcacgtctcgtgcaggaagcgcaggccgcgcgccaggtgcagcacgatgcgcagcgcgtggcgctggtccaggcggctctcgggctgcgtggcgcccaggtcggccagcaggtcgccgcgcgcgcagtgctccatgaccaggaacacgtgcgcgcgctgcacgaacgtgtcgaagacctgcacgacgttgggatggcgccgcgccacgctgcgcagctggcgcgcggcctgccactccttccagggcccctgcaggcggccggagccgtcgcgccgcagctgaccggcgcacttgaccaccacggggcgcgctgcggtgggggaggcggacgcagattgggaggaggacgacgaggaggaaggtgcgctgctgcggtagacgtggcccaggtagatctgcggcgccaggcgcgagctgaccttgatgtggcggtgcgcggcggggcgagctggcggcggcgctgtggcgctgctattgctgctattgccgtcgttgcgggcgttgttgccgccgcggcgcgcgtacacgagcgtggccgtcatggggggtgctggggagtgggggtgttgtcgggcggggcggaaaatggcaaagtgcggcgaggcttgaagttcgggcggcaacttggtggagccttgcagcgtagacggggcgcttctgccgcgtcgcatgttgtcatcgctctgggcaaatcgccggccgccacgtcgcctttacggaggagcatagccgtgtgcaatgatgacgcgttgcctcgcccgtgcaggctgcaggcgacaggttgcaggtaaacctcggcgttcgctactggcgaacgccgcggtagcgaatcgctacccgccaccttgcgcttggacccgagcgagctgctacagcgacgctcctcattcttggcgcagatgagtgcacactgcgagtcgcagctcgccggcagcgcgaatctcgcaaggacaggctcgtcaaggacgaatgtacagccgttgcagtgaccgcgacggcacagcgcctgccattggcgatcgaggcaacaatccctcggatgactcatgacgcgccgcgacgcgcgtgttcggggcaacttcaacttgaacacgccccagccgcctgctggctgttccccagtggctgctgctgctgctactgcttggcgagatgcctgcagcgcgtttggagaacgctccccgatgcggatgccgggcatgcagtgtgccggccaacccacgctgacgaccagcgcatcgaccgcgaccacagatggaccgcagtgcttacgacgacgacaccgcctgtcggtcgtgtcggtcggacactgacctcgcaccggaatctcgctatctgcgctgacttccgccaggacttgcttgctcgtcggtcgctgcgcacgcggagctcccggtgcgcgtgccacgcgcaccgggagctctatcacatcggatcggaggcaaaaatgacctgagtttggttggctagcttttcgttatcgctatctgtacacactgttagttggctattgaacgcagcaacttcgagacttgtctgggtcggcggcgagccttgcggcgtcaaactcgctatgcacgagctcctggacggagcccctgcggacaatctctctccgcgagtcctgcgtggccagtagactccgtcgctgcttggcgctgctgctcccgtcggcgtggaaggacgatacccgagtcacctcgctcacatgccgtcgcaggcgtggggtgtttgagtctggtggccacccagtgcgtcgttgacctgcgtcaatcaaacaagagagctcgtcacattgatgcaagtaatggagaccaagattcatgctcgaatcgtacctggtgcagccgcttcatcggggccctgtttgcagacgcttttggtcgacgacatgcagaagccgcgctcttcacactctcatcgacaaagaggctgaaggaagctgctgtgctaagtgggtgatggagctcctttcctccttccttttcagctacagctcgactgaaatagcaccacggttgccttgttttctcgtcaacttcgtatctattgatagcagtactcgcctgcttgggctactattcacaacgctccagccaagcgatggtctccgtgtgcggggtgtggggcagcatgtcaactggttgaaggtatcgcacgcggtacgttccaagctctccagcttcgggcttggccttggcgcacagtgcctcaagatcaggtacttgcgagtgggggttgcacgacacgtagcaaatgtggcgcggcgtcatgcgtcgtagcatcttgatgagctttttgtgcagtccagctcgaggtgggtctacaattatcatgtctggaagactggcagcttcgcccgagcttgctgctactttctccagcagttcctcctcctgccagttcttggccaagtcgacacagaagaactgcatgtcctcggaagagtagccattcaagcgagcattaacctttgcacgctcgacagcagcctctatgagctcgaagccgatgactttcttggcatgggagcccatgcaaatgccaatgctgcccacgccacagaagagatcccacacaaccggcttctccggcatcgccgctattatcttttgaacttctcggtaaagagcactggcttgaacagagttcggctggaagaacgagtcgaacgagatctcaaaacggtggtccagaatggtgtcttcaaggtgaggacggccatagagaacacgttctgacgtagtgctctccacgatatctggagtggcatcgtctctacttcgccgatgacgttgggcttcgctatccaagcttttcacaatcgataccaacagtggggcatcgtccgcctcagccagcagatccttctcgtgctcttggacaaggtcgtctacaattctctttagcagctcactcggctcgcgattaaatgtcgttgtcaccagaccgagcatgatctccgttcggccttggccgttcactccgcgacgcagcacaatctgctttaagaatccttcgtgcgaagtgaagtcgtacgcctccagacctgcatcctcgcaacgagtgactagctgctgcagcaaccggttgcaagctgagccctgcagcagacactcattgagtgacagaattcgggggctccaaactgctgctcgacgccggcgtgctttgctcttgccatgcacctgcttggatcgtcgagcgctcacagacgccacagggaacatcccaaccgtgaacgggtagcgtggaggagccgcatcgtcgccattggcttccacaggcttgtcctcgtccagcaaccagcgacctgtgctgcaagtaaactccatcttgttacggtagtggtagatgccaccctggccgtccccattctcaacgccaagtatctgccgtatctccatgtcaggagaatgctggcgctctgcgaagagctcctgaatccagtcttgcttctctcgaagctgctgcgcgtagctcacgtgctgcaacttgcagccgccacacacgccaaagtacttgctacacagaggctgcacgcgctcgtcaccgggcttctcaagctccacttgttgcccgaaaattggccaggcgtcccgaggctgctgagctgcccacttgtctcgagactggacgtctcgctcccagatctccacctgcagctcgtcgcccggtgacgcaaaggggacaaccacctgcattttgacgccttcgtccgaaacgtaggtgccaaggccatcgccattcccgttaagcttatcaactgtctgcaaacaatttataacatttcattcgcattagaactcggagcagtagggggtgcagtcggtgcagtcgttgttgcagcaaacgcaccagagcaactcggcgcttggcgtttggtgccgctggagtcttggacgaggcagcagcagagaagaagcggccgccgcgtgcgctaacgagtctcagggagccggtcagcaatcggcgcgagcgccgcgccgacgccaccaaccgggccatttttgtctggtcctcctgaaaagctcgtgagtgattatcagccaatcggaaggtggcacgaccaccggaacattgacggatgtgatgggtcgcaattgatcgacgagcagcaacaagtatgtggctgcatgcatctacaggtagctagatacatgccatgactgtcaacttaccaaacgtcagtggtggccatgacgatagagctcccggtgcgcgtgccacgcgcaccgggagctccgcgtgcgcagcgaccgacgagcaagcaagtcctggcggaagtcagcgcagatagcgagattccggtgcgaggtcagtgtccgaccgacacgaccgacaggcggtgtcgtcgtcgtaagcactgcggtccatctgtggtcgcggtcgatgcgctggtcgtcagcgtgggttggccggcacactgcatgcccggcatccgcatcggggagcgttctccaaacgcgctgcaggcatctcgccaagcagtagcagcagcagcagccactggggaacagccagcaggcggctggggcgtgttcaagttgaagttgccccgaacacgcgcgtcgcggcgcgtcatgagtcatccgagggattgttgcctcgatcgccaatggcaggcgctgtgccgtcgcggtcactgcaacggctgtacattcgtccttgacgagcctgtccttgcgagattcgcgctgccggcgagctgcgactcgcagtgtgcactcatctgcgccaagaatgaggagcgtcgctgtagcagctcgctcgggtccaagcgcaaggtggcgggtagcgattcgctaccgcggcgttcgccagtagcgaacgccgaggtttacctgcaacctgtcgcctgcagcctgcacgggcgaggcaacgcgtcatcattgcacacggctatgctcctccgtaaaggcgacgtggcggccggcgatttgcccagagcgatgacaacatgcgacgcggcagaagcgccccgtctacgctgcaaggctccaccaagttgccgcccgaacttcaagcctcgccgcactttgccattttccgccccgcccgacaacacccccactccccagcaccccccatgacggccacgctcgtgtacgcgcgccgcggcggcaacaacgcccgcaacgacggcaatagcagcaatagcagcgccacagcgccgccgccagctcgccccgccgcgcaccgccacatcaaggtcagctcgcgcctggcgccgcagatctacctgggccacgtctaccgcagcagcgcaccttcctcctcgtcgtcctcctcccaatctgcgtccgcctcccccaccgcagcgcgccccgtggtggtcaagtgcgccggtcagctgcggcgcgacggctccggccgcctgcaggggccctggaaggagtggcaggccgcgcgccagctgcgcagcgtggcgcggcgccatcccaacgtcgtgcaggtcttcgacacgttcgtgcagcgcgcgcacgtgttcctggtcatggagcactgcgcgcgcggcgacctgctggccgacctgggcgccacgcagcccgagagccgcctggaccagcgccacgcgctgcgcatcgtgctgcacctggcgcgcggcctgcgcttcctgcacgagacgtgcaacatcgcgcatcgggacgtgtcgctcgagaacgttttcgtcacgcgcgacggcgtctacaagctcggcgacttcgggctcagcacgcgcgccgaccgcccggccagcggctgcgtgggcaaggcgcagtacgcggcgcccgaggtcgtggcgcagcgcggcagctacgaccccgtggtcgccgacgtctggtcgctcggcatcctgctcttcatgctgctcacgggcgcgccgctgctcgagctggcggcgcccggcagccccgagttccgcacggtgcgggccgtgggctgccgcggcgtgctgcggtcctggcagatggacgcgcagctctcggccgccacgatggacctgctggacaagatgctgcagttcgacccggcccggcggctgcagaccatgaaggaggtgctcgaccacccggcgctgctggcggccagtcgacaagacgccgaagccgacgcctaagcccagaacggagacgaggagacagcagccaagtgctgagctgcgtcttcttgtcctcctctacaagtgatttattgcgtgcagtgcatgcctcgccctgtagatctgccgttctccaccatgatattccctattctcaagcaaaatagcacgaacgttcaaatgtccaagtcttcgtcctgcgcaaacttccgctggggcaggatcgccttcccattgccagagttcctactatcgggctgcatgcagtagcatcagcactcttgtatttaaccatgtagctcagcaacggaattctggtccagcgtatctgcgtcctaatctgcatcatcgtgtgtcagcttattagtcgagatgtgaccacgtacgcagtacgtcatgcatcttataataaagggtcttaacgctgagaggaatgcccaacattagtctgctattgttggagctggcacactcaggttgctacgtccgcattgcattttcccactacgtagtcttcctcgcgccaaacggaaggcggccggagcattgccgtcgccccacagccatcgccgagcgaggcccaagatgcgcctcgacgcagcagcgtcttcaagtacattcgagttgtcgcggtagctaccgaatatcggacgcgcgcgcgagtcgacagcaaaacagcttccgtcgggccaccccggagaccgcagtggtcactccctactctctcgacctcagtggagagtttcggcctcggaagaagagcaggacgttgcaaagcgttgacgaagatgctgagggaattccaacgaaacgagatgcctttgggttccccattccactgatcccgcgacagccaagtcgtctcgcgaaatctttcagtatgttcgggtactcgctagccccgctctacgacgtctgggagcgattgcaagtgagccactgcggccaatactccgtcgagaggatgctggcgttggacgaatactaccaacgaacctcatttcgacgggtgctagcagtgtgtatactgatgccactaatccccctactgctgatcatactcatggagttggtgcctttgaggccggtcgaagctggagcgagtgcgaactacgttttctgggggcgacatgcgctgacgctgtggctcaccgctctctgtgtcgaaggacaggccaaatcgtggattcctgagctcccgttgaccacgaaccaagctctattgatcgcatcaggaactgcagtcacgaccgcggggctcgagctgctcaccgcagagttgtgggtatttcccgttccattccttgatgtccttggttcaccggtattttggctcagttgggcgattatgagtcgattggtactgggaccggacccggttctaggcgttcaagacgcgaattttcgtgtatggcggtatcttcagatcactgcagtcccgagttcgcttttggccatttatccagcgtatcaaattatcttcgcggcagtaaatcgattcgtggagatgctgatcgtctctctgttgccagttatcaacgtggtgctgaaaaacaccttagtggcttgcggctcccacctcgaggacaatctcccggagttggtcgtcttcactgtcgacggctttagtgcgctctactcagtcatttgcatgcgggggacgaactcgttgaaaatggtggtggccacggtgtttattaacgttctagtcatggttttgtctctccacggcatgaatcggcgctcacgagctgaaagggaatcgcgttcctaccatcttatgcaggacaagcacagagaactccatcctttctcacgtcgtcttcatccggtggcagtcccgagttactaagcacgttagttcgtacaacgctcaaaatgctaagggcacccggacaactagatcctacagagctgcgtcagattcgttttctgtcaggtaagcaacacaaactgtcgaatgccaacacagctttgctgcaatcgctagccgcccggtgcgtttaccacaacgaccgaaagttttccgagaacctttccatgagtcaaatgaaggcgcgttatgcatcggcggcaatcgaagggcgcgttcttagccaagctcactttacagctccaacgtcgcagcaatcgcggctagtacagccctacgagctcttccagaagctggtcgaaagcttagcagtggagttgagcgcaattttcctagttttcgtagtgctacggggagtcgtcaatctgcgccacaagtcgccgggaggaccaatcagcgggcagtgcgagctgacccagcggtccggccaatcaaagcgcgccggtgagcatcgagagcgctctgattggccacgactggacgacggcgactcccttgtggagccagtcgttcctggcgaccggagctccagcgaaaggcatgcacctggccggcgtgcttgcacgccacggctgggcagctcgggggtgaagccgcggaccaagctggatttctgcgtcgctgcgtgcggcggcgtattgcggcggtcttttgaccgtcagccggaaggcggggcctgtggggggtccacggtggtctacatgtagcccatcgcgccgtttcccattacaaaccaggccacgggtgacgccgtgggccctcctggtagtcatagcctacaaaggttgcgtgcgatactggcaggtcaccagatcgtcgggtgtgcggcactccaacgtgcgcacaccctccacagcactcgtagtgacgcgcgggagcatgctgtcagtcaacgtggcctgcgctacatggagctggctgcgacggggtggtcctctcatggtgcactcatggcgcggcggggcgaagaaaatcgcagtggcagagacccagatacggcagactcggggaaggtgacgacacgtcgccgcataaagcgctgctggggcgctcgctggtggcctgcaacacattgggaagaaggaacgcaagtcggcccaggaaaatgcagtggagaactcaagcttcggagggcaggcgctgctgacggagcagcgggaccgcgttcgctgtccgcggtaccaaatcgacggaagtcgagtagaccgtttcaactattcggcggggcatcgggagatatgagctcggtgttgacggtggatgcgtcggtcgttatcttagttaggataaatgaactcaatctaacctcaaccttgaaatgaaatgaaatgtacggggagtcgggagaaaaccaacaaggaaagtgatgccgacgcaggccgaaggtttccctcgcttgccttatcccgcgacttgccaagctcatgaaggcatcttcacgttggatatcggagcgaacggcatctccgaagaatcggccccctgtgcagatgccagtcatggatctagacgcctttgccaagctacgaactctgttgttgccggggagtcctgtaatcagcgatgtgttagtcgagacgcggaagaaaaacacgagagcagtgaagcaagcgcttcagctgttattcaacaacgaatacctggggctaacagcgtatacgctgtttatcatccccatgctgtacgtgctgtacatgcccatactacaagctctacgcaacgagaagtattacccgacccacttcgtcctgctggagaacgccgactagttcctcgaccgcatgacggtaatcgccattctggcgtttttgcagctcgctgtactcattgttttacacgttttcgtggcaactcgcttcgccgtctccacgatttaccagatcgcgttcgtgctggagacgcatttcacactggtggctggtagactgctcgtctccttcatttttgcagttcaatcgacgttcctgcactaaggtaaggaattctctattttttaatccaggcttgaagatgcctaattttcatatatttttgttacctaggtgccgatttctcttccaattttcctggattcagaagaaccctccatcacctgaagcctaatctactacagtagcgcgccaggttaatcgtgagcggccaaagatgctgtgacttgatgccttttccaggttttctattgtacctgtgaaagtaatactttaccagggatattaagctcctcctcctcaaacaccttagtccactgcatgattttgctatcggaacatcctttacgtatgtttacgcttcttgcacaagcaggcatcttcagctctattagtgaacaccagaactgaaaaagtgtcaagggtgtcagctatcattggcccaggcgcaacgcacttatccggcagttcgatactagcaacttcggtcgaaacgccaaaatctccgacggcctattctgggtcaagctaagcgagatgaatatgtagccgtgagtgattttgccttctgctggggcgatggacgatgctcaagacgttgtcgtccccctgcagtctgccagcacccgccccgctcctcttcgtggtggcgcgagtagaaaaagtattcgaggggtggcggtagcgccccatttgggggccacacccaagagagggagcagcgtattgcacaacgtccacggccgggcattgcctgcgataaacatcaatacttctcctccaatcgatgctctctcgatcgataccgatggtaaagcagcatctccggctcgagcgggttcgcggaagaccctccgacgcagcagcagcttctcgcaggccattcgcgagctctcgacggaccatttgcggacgctcgacagcatcgacatcttgacccggaacagcgagcaatcgcagaatgaagtatctaccagcccccagcgctcaccccgagcaggttccaaggtcttgcctcgtcgacgaagctacgtgctgcacaacgacaacgacaagaaggcggtgccccaaggaaaattgctacgccagagcagtttgctcaagaaccttcgagagatggcaacggtcgttcccaagccccccgggactattgaaggctctccagagaagaaaacaccaaaagatcccgctcaaccagcagcgaatcccaacaaaacaccgtcagcagagaaacgtgaggcgtttatcattgttccaccggagatcgagcgacagcctacgtttggccacggtacggcacgatcgagtttgtttgggtactcgattccgcctctttacgatctttgggaccgtttgcaagtcagtcactgcggacagtactcggttgagcggatgttggcacttgactagtactgtcagcggctgtcgatagtacgcgtgctggcggtttgcttgctatttcctcttggaccgctactggtagtgattctaaccgagtgtatgcctctgcaacccgcgcagaagggagcgctggcgaattacgttttctggatacgacacacgatcatggggacgattctcgtgttttgtgccatggtgcaggcgaaagtgtggatcccagacatggctttgtcagtaaagcaagtgctggccgtggcgcttgggaccgcggtcgtgtacacggcgatcaacgtggtgatcgccgacttgtgggtgttcccgatcccgtttctggtcgtcgctggagctccgttgatgtttagtctatgggcgattggcagtcgcatcgtgctggggcctcatccattggaaggcgtgaaagatggacagttccgaggacgtcgagtcttgctactaaccgctgtgcacgcgtcattgttgggcatctatccagcgtaccaagcgttgtttctcgaagtggatggagttttggaactgggaatgatcgcgcttataccagcaattaatctattcctcaagaacttacagacggcgttaggatcccatccgaggacagtttacccgaagttgttatcctcagcgtcgacgtcttcaacgcgatctactcggtgctctgtatgcacagcgccaactcgatcaagatggtggcggtgacgctggttctcaacgctctggtcatgatgctgtcgctgcacggtatgaaccgccggtctcgggttgccagggcctgtagatctttccaactcatggagcggcagcagcaaaaccttcgtagaacgcagtccgtcttggaatcggtcatcacgggtggttataaccccgcgttgctcagtacgttggtggcgacaaccctcagaatgctcaggcaccgggccaactggactcccaagaactgagcaccattcgactgctgtccggcatgccacaagagctctccaaggcaaacgccgccttgctagactcattaggagtgcgaagtgtgtacaacaacagccgccgaactacagtgtcgacttcagtgtccgcgatcaagtctcgcttctcgtcggcagctatggagggccgtttactcagcgtctcgcacttctcctcgccctccccacccacgtcgatactggcgaagagattgcgtagagcggtgctggtcgttcctgccagtatgtggctcaactcacgcgtcagttcgcgtacaaacagcgccgagaacggaatgttcaaccaccgcgacaatcacagcagaagcacagagtcggaggaatcggaggctgataagttctcacgacggccatccacagattcatccgagactgcaatgctccaggtcccgacactgttcgctccacggatttctcagcttatccacgccacttcgcactcgacgatccagccgatatcctcgccaagactgtcacgtcccccagttccttcgctttggcaagaaacttcggataaattgatccctctcgtgtcgaagagcaaccctgtcatcggtaatgtcgtggaagagactcgaaagcagaacactcgagccgtcaagcagacgctgcagctgctcttcaacaacgaatacctcgggcttactgcctatacgcagtgcattatccccctcatctatctgctctacatgcccgtgctgcaggccttgcccaatcacatttactacccgacccactaccgctactttggagtgaagaccgaatttgatgagcggatgactgtcattgggagtttgactgggcttcagctgatggttctcgtggcgctgcaagtgtttgtggtgaagcgcttcggtgtctcgacgatttaccaggtggcgttcgtgctggagacgcacttcacgctgctccagggtcggctcttgatgtggcttatctttgcggtgcagtcgacgctcatgcattatggtaagtttgccaaaggaactgtgctgggtagttggtacttaagtacacagcttgctaactagttatcgtgctcttgtgcaggcgtcgacttcagctttcgatttgagtgggtgcacgagccgacactcgggaactaggcaggctcttgttgatcgaagcaagtcgtgacatcgaagggttgaagcatcagtacagtagtcgtagttgtgcgagtgaattccgaatctttcaattgttgtcatcactgtgtgatgcggcaagattatccaccagttgtctgaacagcagagtttgttcagttgtaggctttgccgcgacgagggccacaacagtatcggtgcacctgcagcagtttagctcatttgtgaagaatcgctcactcgttgccaccagttgataatttgtggtcgactttacaaaatagcatctacactcatactgaatcgaagccggaaggacatgggctatgagggtgaagatcattcggatctagcagtagttgaacgtacttgatgttggaataatgggatgtgtataggtctcaccccgggaagttgcgtcggtcgtgcttcatagttcccttaataactaacacttttccgccttaaagggctgatgctggcgatcacggcaagccgagtactgtgagccataatcccgccgttgaaactgcaacactccgtcgcacgctgtcggtgatccgtctcctatttcggggacaaactgactgactgactaagtctcctgcaatccagtgggctagaaacgacttggctcttactcacaaatgcttggtgaacaggatgctcgttcgcgctctctcggtgttcgaccgccatttactcgaggctctggaggcggaagcaggaaaggtttgcgtggtgtggctgtggctccatatgtaggagctacgcgaagtttaccccaacgtgacagcaccgtcttgcacagtccctcactggagaaaacttctccaactcgacgtcgagcaaacagcgtgtcacaagcagttcgagccctcgatgtattgggacctcttgatagtcttgcagttctacgacaccagggcgacgctctcaacgacagaacagactcacggaactcgcctcgtcgagggagctacgtgctacaacacaaccgacaagcatcaagacggaatcgactggttaaaagcgcctcactcaagaatttcagggagctttcacctctcacccccaagctcccaggcgccattgaaggatctcctgaaaagaccaagtcggctgaaaatattccaactcctcaaccaccaagaaatgctccttcggtcgagaagaacaaagcgcttattaacgccatgccgctcctggctatcgagcgacagcccagtcacctcgccggatccattacattccttgggtattctcttgcgccactctacgattcttgggagcggctgcaagtgagtcattgtggccagtactcagtcgagcggatgcttgcattggacgaatactgccaacgggcttcctttgtacgagtgttggcggtctgtctgctcttcccattaggccctttggtcattgtggccctgacggagtgcatgccattgcaaccggtggaaaagggtccatttgccaactacgttttctggatccgccacactttcatggggacccttttggtcgtttgcgctatggtgcaggcaaagtcgtggattccagacatttcaatgacactgaagcaggtaattatggtggcgatcggtagtgcgttggtatacacggcagcgtgcatcgctatcgccgatctctgggtgttccccataccatttcttgtagtggggggagccccattaatgtttgcgatctgggcgaccgcaactcgactagtgctggggtctcgtccgttagatggcgttcaggacggggaattccttggtcaccaatttttattgataacttccgtccacgcctccctgctgggcatctacccagcctaccaagctgtgtttctcgcgttggacccgtggatgcagttaggaatggtcgcgctgctccaagggattaaccttgcgttgaagaacgttcagacggcgctgggatcgcacttggaggataatttaccagaggtcatcaccttcagcgtcgatgtctttagcgccatttactcggtgctctgcatgcacagcgcgaactcgatgaagatggtcggactcacgctggcgttgaatacgtcggtcttgctgctgtccctgcatgggatgagccgtcggtctcgggccgcccgctctagtcgcacatttctacaacatcagaagcttcgcagacctgacgacggccccgctcagctgaccacgctggtcggtacgacgctcaggctgctccaagctccagagcaactggatttggtcgaagtgcgatcgactcggctactgtcagggttgccgcagaagctttcgaactacaacaagggggtattaaacttgctggcaactaggagcgtgtacagcaacagtcgccgagtatcagagactgtctccgtagccgagataaaggagaaatactcttccgcagcgatggaagggcggtctcttagtgatctccatctcccagccccaccgacccgattaaagaacaatccaagactgcgtggagtcttcttggtcgttcaagcaactcggtggttgggtgcatattctcgaccggagcttcgcgacagctctagcaaaagcaccgactcggatgaatccgagagcgagagggcgagtcgcccatccaccgttgttccagagccgacaaccgatccgacttcgccaaagtcagcattgatctcgctcagccaccctgccatcaacgagctggaggcccgaaagcagaacactcgagccgtcaagcagacgctgcagctgctcttcaccaacgaataccttggacttatcgcctacacgcagtgcatcatccccctcgtctacctgctctacatgcccgcactgcaggcgttgcccaaccacatttactacccgacccactaccgctactttggagtgaagaccgaatttgacgagcgaatgacggtcatcggaattctagctgcgcttcaactcgtggtgttgatggtgctgcaagtgtttgtggcgaagcggtttgggatctcgacgttgcaccaagtggcgtttgtgctcgagtctcgactcgcactcttgcagtgccgcctgctcatgtggctcattttcgctgtgcagtcgacgcttgtccactatggtgagcactatatggacggcgagtaatttgtccaaagtggcctaacattgtttggtttggttcgcaggtgtggacttcagtttccgcttcgactggctgcacaaacccagccagggatgaaccttcacccgtgctggacacagtaacagcgcgcgactagcaggtggcgggcgtcacctccgtgttatccggaaattcgatggtctcaatttggaagcctattctcggttgggggggggggggggggggctgacgctccgctgcactaattccttccgaagaatgcgccaagacagacctgtccaagaaactcgtcattcttcacatgacgatcaagtggtgccaacatcgagaaccgatatccaattcaacccaaaacgaggcagagcacggcacggtcgcggcttgctgcgaatatttggcgataaacaacgagttacaccagaatggctggcaacacctggagattgcgtggtgactaggagtacgctcagtggaatcccggaatctcgtgatgcgagtaaaccggggttttgggtgttcgggtactcgctcgccccgctctacgatttctgggagcatttccaagtcagccactgcggccagtattccgttgaacgcatgctcgcactggatgaatactgccaaaaagtgtcgatcctccgagttgtgctggtttgtctgcttttccctctcggcccgctgcttgtcgttgtatttattgaggcattgccactgcagccggcggagcagggagcgctggcgaattacgtgttttggttgcgccacactctcctggggacgatattaattctgtgcgctatgatccaggccaaagtgtggattccagagatgccgctgactccaaagcaggtccttatcgctggagttgtgagttcatcagtgtacacagcgacgaacgtactgatggcgtacttgtgggtgtttccgatcccgttccttatcgtagcgggcgctccgttgatgtttagtatctgggcagtggcgagtcgaatactactgggggcccacccgatggaagggattgaagacggggaatttggtggtcgaaggttcctcatgctcacagcggtacacgcagcattgttgggcatctacccagcgtaccaagccattttcttgaggacggatgggattctacaactggtcgtggtcgccttgttaccagcaatgaacttggcctggaaaaatcttcaaacggcttgggggtcgcacctgcagtataatttaccagaggtgatcgtgttcaccgtcgacgcacagcgccaattcgctgaagatggtggctctgactgtgggcctcaatgcattcgtgattctgctagctttttttttgtagtattgtagtcacttagaacctaacgacgcttctgctagccttgtacggtgtggatcggcgttctcgggtcgcaaaagcttgtcgatcgtttactgacttgtcgactgcgcaaagtcgagatggaggtgcggagtcgttgagttcgctggtaattgcgaccattaagctgctgcagtcccccggtcaactcgattccggcgagctccaagcgaattgactgctatctggcacgcagcatcggcttagtcaagcaaataccgatcttttggcatcattagccgctcgctgcgtgtacaacaacgagcgtcggacatctcgcatgatttccatgatccaaatgagggcgcagtacgcaacagcaggaattgaagggaggaagcggagctcttcacgcttcgtagtgcctcagcagccgcgctctaaactcttcagaaggctgcatactgttgtggtcgttgtaccaatcgtgaactcgcggttcggcattcgaagtcatcgccacatcaacagttccgttcatcctcaagaagcgatcgatcaagtagagacagacgatttttcaggggacatcgttgctgcacggatttgtccagctgtcacgaatagcaacgccgttatcaccgcggtactggaggaaacgcagaagcagaatacgcgagcggtcaagcaagcgctgcagcttctattcagtaatgagcatctcggactcagcgcgtacacacaggcggtgattcccgtgctctacctctgctacatgcccgtgctgcaggcactacccaaccacgtctactaccctacgcactaccgctactttggagacgcaaaggagttcaacgagagaatgacagtgatcgggactctggcgatgttgcaattcgctggattaacggcgctgcaagtgttcgtgtccaagcggttcggcgtctccaccatttaccaagcggcttttgtgttggagactcagttcgttttcctacaggggagactcctcatctggctcatcttcgccgtacagtccactcttgtgcactatggtacgcttcattcccaacttctacctcattgaatagctatagctaacctaatttttatttttgtttaggggccgacttcacatttcagttcgcttggctgatgactgccaaatcgggaggtggtggatgaatctcaaggcaaagttagcgcagaaacagctattcatgggccactcaaatgtcaacatctccaactgcgctgggtttttgagccagcatgcccaggaaacggggcatagtggtggtggctccactgccgatagcggtggcgctcactccagtcaccccacatcgacctcaccatgaacgtcaaccaagtcgaatcatcgcgaaggctttcgggacgtcactcggaccattgtacactttgtgggagcgtcttcaagtgagccattgcggccagtactcggtcgagcggatgctggcactggaagagtatggacaacgggtgtccccccttcgcgtggctgctgtgtgcgtattcacgccactacctccactgctgttggtcgttctagctggatacatgcctctacgtcctgtagctgaaggtcccgacgccaactacgtcttctggatgcggcacattttaattcttggattcgcggttctcagcgggttgatgcaagccaaagcgtggctggcggagctccacttgacgatcaaaaccattgtcagtaccgcgctgagtgttgcagttgtgactacagctatcgcgtttattacggcgaggttttgggtcttcccgctgccattcatgaacgtggtgcaaaccccagggctcgttctcatttctaccattgcggcgagggtcgtgttaggtggaaacgctcttcaaaacgtccccgacgctgaattccacgtaaatcgattctttttgctcatcgtcgcgcaaggctcgctcgccacgatctaccccgcctaccaggcgctgtttctcgccgtaccgtcggttgttcagccgtatctgatggctctacttactctcgtgaacattgccatgaaaaacgccctcgctgcgtgtggagcgcacctggaagatcgactaccggaggttattgtgttcactatcgacgtcttcagctccctctactcggcgctttgcatgcgcagtacgaactcgctcaagatggtggcgatcgccgtgtcactcaacacattcgacatgatgctggcgctgcacgggatgaaccggagatctcgagtggctctagcgaatcgcgctgaccaacagctccaggctagaaggcagaagcagagcgatagggagctgggggtaaagtctaaagagtctcaacaagactcacttgggtcactgttcaaggccacgctccagctcctccagatgcccggccaacttgacccggccgagttgcgtcagatttgtctattatcctgcgccgagcacaaggtatcggaagataacaaggctctactcgaggcactcgccgctcgatgtgtgtacaacaatgagcgacggccgactgagatccgatccatggcacagcgaaaatcccgctactcatcaaccgcagtgagtgggccggacctcagttttgcggtagcaataaaaccgccttcacacttcctgcagaggctacgagctgcagtcttactgatctcagaagcaggcaaacgcttcagtgtccagattgggactcgtctaggcaattcactcgggtttcggatggatagtaaggatcgactgagccaacgacaggtagacacggagggcgacggtcaatcggatacggacagctttgagaacgacacaacgccgaacgaagcggcggagttgacatcatccccgtcaaggcggtcgtcaactcaaacccgctccagtactccgtctgttgagcttttcacacgacgaatatcgggtcaaacaggctctggtcgaaggatttctggccaggtagagccgttctcccgcagaccgtcgactcaaggaggatcggggcgcataatctccactcaaatgggcgcaggatcgtcgcgccgagtttcgtttcaaatgtcaggagggtcttcacgtaaagtatcagcgttgccagaatcttcttcagttcggaagctggtcccgcaacatttgggatcatcgcggaggttggcggagctcactgcagcctctactaagctggctacgacgctcaagctacggtcgattttgatgccggggaaccccgtgatcaccgacgtgttgaaagaaacccggaagcagaacacggtggcggttaatcagacgctgcagctcctgttcaacaacgagtatctgggtctcatcgcgtacgcgcagtgcatcacccccatgatatacatgggctacatgatcgtcatgcaggagatgcccaaccgcgtgttctacctcaacgggcaggatatgacccacccggagggtctggcgcagcacttcactgtcatcgtggtgtttgtggggctccaaatgggaattttgatcgggcttcacgtgtttgttgctactcggttcggggtatccacgctctatcaagtggcgtttgttctcgagacgcacgcccgactcgttcaagggaagattgcaacgtggctgcttttcgccgtgagcttcatgctggaacactatggtaagcgactatctcatgtgaatattgtgacaaaaactgacttcattgaactcacgaactgataaaggggccgactttagcttcagattcgagtgggtgaaaaatgcccagcatgatgactagcatgcggttgtcaaaaagtgaatacttagtaccacttttccgagcggaggtagtactacacgtatgtagttgcatcaatagcgaaaattaagaactcataatgaaaaattgtgcaaaaggtgatacaaggatgcctatcgtagtgcgtttgtcgaagtagctaccagttgtgtgcaaaggtgattaaataaccagtgtattagcgagttttcgccttttcagcggccatgaatccaggcaaacctgaaagaaaagtccgagcctgtcaaagaaaatataatttcgtgtgagaaaagaacagcggacgggagtattacagacaacgacggataaatacggcaacgcaaaacccggcacacatatgttgtactttttacaataagtaattcagatagccaatcagcttcgagagttacacttgagtttgtattctatatggttttaagtacttactctaaatttgtgtgtactttatgctccgttacgtgtattttatgtcattgccttgtacaatctctatcgttcccgacagagaattctggcacatttactacggaggatgtcattcagttatgccggatttatccgtcgttgtctgtataacgttagtcgcatatgtggggtgcttaccgtaatgcgctagtgggagtgagacggtgtaaattagccagattgctagtttaccgtggacatgttccgcgtgcgtttccaaaacgaacgcaacttggtgcaaagttgagaccgagagacgtttgccaactatccagtgaagcactagcagcgacatgagttgaagcatcgctagaatgctgatcactgcgaagaattcgccatcgccaatgcttcggtctctggggtaaaatattcgattgggaagcttctgtaacactgccatatacgccatgtagatgcacggaataatgctctgaatgtacgcaatgagcccgatgtactcattttggaaaagcagctcgagagtgcgtttgacaacttgagtattgcgctggtgaacttcgtgatcagcttgagttgggatactcgccggttttaataaagctgaggtatcatttcgagtcaagtgattcacggatggcggcgtaggttcgggaaagatcgtagagtgagatgacatggagcattcattgcatggccacgtggtcttcgttgcacgtacaacgttcatcagcgctcttcttagcaaaagacgcttggatttcgttctggtgatttcacgcttggtgttaacagcacacgcggccagcttgtgcagcagcctttccttcgcggaggaaatattgtattttgcccccgagaaaatgcgtatctgtcgtaaccccgaggggtctagtagggtgggggtctcgacgaaatgtactgctgccgagacagcagaggttgtcgtagaatctggattctcgagtagatacgtgcggatggtatgcgttgttcctttcattgtccggtacgccatcgcgacttgaatgttgagcaccagaatcaaggcagccacgatcacaaacgaattcacactctgcatacacaaaactgtgtagagcccatccgagacttccaccgtgaacactaccacctccggtagtcgatcctccaaatgcaatccattggctatgatcactttcttcaccacgaggtccatgatcgggagaaatacaagcgacagtcgtcggatagtggtcgacacagcgagaaaaaccgcgtgatatgccggataaattactatggcagacccctgcgcgcaaagaagcctcagaaatcgttgcaattgcagtccactattctcaattgatgccagcgactttctccccacaacgctgacatagacacaaatgagaacaaccgcgcgcactggagtacccaaaacagcacaaaacggcacggggaaagtccacaaccttgcgactgccaggtctcctagagtagagattgtggagctgcacaaagcgattccgagaactcgctgaggggtcagagggatccccaagatccacgactttgcctggaatccgacagcgaccataatgatcgtcactaggatcaggtgtcggacccaaaacgcgtagttcgctgttggcccgtcggaaggtggtcggagagggagacactcgaccaatatcacgagcatcaacgtaggaacgggggtcagcacacacacggccacggcgcgaagcaatggagtacgcctgcaatactcttcgaaagccaacatccgctcaacagaatattggccaccatggctcttgcaaacattgtagatcggcgcaagtcggctccgttgaggtgctactcggatatcgggagccgtcggtgccactactgagccttgggcgatggacatgacaagatgtttcgagtagcccaagtgtcaaatctactataaatacgatgcaccaaaatgaatcgggatcaacgcaataaaaaaattactcaaaaacaagtgaggtttgtcgttctgtacattatacgcttacattgttgtgttcgacgacaattgtttgtcactcataaacgatcgcacctgatgcgtcgaggaatatttgcagatttcacgagggaacctcaacatcgccatacaaccgctgagaagctataaggtgactagatcgtgcacatagtgtatgtcaagataaaagctcgtgccacacccagaagacgcgcaatttcgacacgattcatgaatttcacagtcaagtgcttacaggagaacatgatgctacagaagtactaaatgttacattgtgcgatcacgcatccaagagaattgaaaggagaagtcagcaccggaatcatccacacgttagcttgcagtagattctcgccaatcaacagcgttcatagccttaccgtagtgctcaagctggaatccgactgagaaaatcaaccatgccgacaatttgccgtggacgagtagcgtttgcgtctccagcacgaacgcgatttggtatagcgttgacaccgcgaaacgagacgccacaattcgatgcagcaccagcaacagtgacaactggaaaacgccctgcataccgatcaccagcatgcggttcgcgaacagatccgcgtcttccacgttgcgcgtgccagggtagaatactcggttgggcagatgctgtagcgccgccatgtacacaatgtacattactggaatgatgcactgcgtgtacggtccgatggacgtccgactcgcagcgagaggtccgctatcgtgggggccgtcgattccgacgcactggaaaacttgcatagtggtgtggcttcgataatatccttgacgcatggcgcgctcgcctgcgggtcgccaccctttccaatgtctacggcaggaacgccttcaacaggacaactatctcagtttaccaatgctgtactacttcgagagcacctgcctgtcaagctatgggactacctgcaagaacaattttcgccggaggaggaactatcccaacaccgttcgtcaattaggctcagtctacagcgatatcaggactctatagtttaaacaagcgtaaatagaggacctctgaacacacaggaacgacttcaacagcagcaggacgaagtagtcgttgcaatccgattcgtggcattcgtcgcgctctaacacgctgcccactatcaggaacaccgcttgttgtggcggacgcatacgtgctcttgagctcagctatggatgaggctttcgaggacgctcggtcgttctgataccctgtgtaacgatcgcagtaatgcagcagtctcgtcagcgatcttgtgccgtaccccggactgcagacgaatcctattcagctcagacgagtccagcgtggcaggtgtctgcagcagcttcaacgtggcctgcatcagattccccgttgaatgcgcagagctaccaagctgcacttcccgctgcgttaccgtcgggtctccaagctctcgactatgagctcgaataaccgaaagcgcttgtgcatggaatgcaaggacaacgtcgcgtcggcaaggcgcaacgacgccattatggccaccatcacgaacgaattctccgagcgcatgcacagcgtcgtgtagagcgcgtcgtacacgtccacgacaaagacgacctcctccgacaatcggtcttctaggtgcgacccgaaggacacgatcaggttcttcaacgcgagatccaaagccggcagcagaagcagcaacaaccgctggaccaggctcggcgacacgaggaagagcgcgtggtaagccgggtagatcagcatgagcgacgtctgcgccgagaagaggttggcgtatctccgcagatggaacgcgccgtccttcacggcgcgcagctcgccccgtccgatggtgcaaatcacggcgagcgcgacgatcacctcgagcactggagccccgagcacgacgaggaacgggatcgggaagacccacagccttgccacgaggatgtccagccatgtcgcaacggcggcacacccgagcgagagtccgacgatccgttgtcgagtcagcggcgcgcccgggatccactccttggcctgcttcatggcgccgtcaccatggccgcgtggcggatccagaacatgaagttggccagcgcgccgccggtcgcagcgggacgcactcggtcagcaccaccaccaggatcgccggcaacggggtgagcaacagcacacacgcgactcgcgcgcgcgacgttcggtggcgatactcgtccaaggcaagcatgcgctcaaccgagtacatgtactggccgcagtgactcgtctggagccattcccacaatccgtacaagtacctcccgccgcgctcgagcgtcggatgccgttcagttggcggtgcgagcacgtccgaggcctgcggggccacggcaacggcgccgcgcagcatgctgctttcctaatttctaggatcagatgaccagaattattattattcctatcaggatagtgctgttgttgatgaccagcgttgccgctgtcgcgttccctaaaaatacttcgcctcagtttttcgttttcgtgcctgcgcgctcgtcagagaaagatcaaagcgttgccttcacttcaagtggtgcatccggctcgattaatacagctcttcacggtggattcgcaaggtgcgtcctcgtctgtccatcgctccgagacgattggatttcgttgcagggtggccccgcgcgaatcaggaatctggaaccgtccacaccgggagggagcagccggccaagcaaggccagccagtcgatcggccgtggacaggttccaatttcgccacctgccaagaacgttggccaaatggagcgtgccattggcatgtcatgatgccatgcctcgtcgtccctgctcgctcgtcctgcgcttgccggctgctgtctcaaatcgccgtcccactgaccggcgccaagctgctcgccgatgccgcgcttgcttgatgacggactcgctcgggcaaaaggcacaacgcgcgacgtccgcggagccaagcggctcgagccaaaaaggccaacacgcagcagctgctgcaactcggaaaaaggaacggcataggcctgctctgcttggctcggctgggctgctcgggggccggcccactgcagccctccgccggcaacaacctacggtgcacctcgcgcttgctcaagccgcgcagccgacctcgcttggccatggtaacatccatatttgacccaggactctcttgacaatgaggaagcgagaacgagttgatcccgtcgtggtggtactgttcggacgatgtgacgcagcgcaggtcggacgagatcagcgtttgtgtggcccctgcgcggcggaatgccatgccggacgagaggcccaggccgcgtgaaggggacgggtcgtcgggtcgtcgcgaataagactcgtctgacgtggcagatcgcatcctgcactttggcgagtgcatgccgagtgcataatgcctgcgccttgagtcaaatgcgagcgctatgcttggccgagcgctgcaactaaaattttaatgcgcgttccggaggcgttacggcgcagcggccttgggctgggcaggctaatatttcggggcgagagcagctctgcgccgctcgacggcggaggatggatgagtggagcgaaggtccctcctctgctctgcagctctcggcagccagccagccagcaggcggcttcaacgcgccgggaccggcggcagttattagtcttgaagccgcgcgcagcgccgcagacgactgccacgtcagaaacgaggccgcgccttcactgcagacgcggcgcgcgtgagaaaatgaccagcggcggcaacagcggcggcggcgcgctctgggcgccactgagccccaatccatcggcgctatcacggcgcggccgtgggatcgtaagcctcgtcttctctcgccgcggcgcgcggcggtctcttcacttgagaactgagcccgcgagcgacgcgtccaccgacgccgaccagctcaccactggcaagcagcgcgccgcgacggcggaccagccacatcagcagcaacagctcgagcagcaacgccagcgcggcctcatgtccggccgctcgtccgagccggccctctccgaccgcgcgcgcacctcgtcgggctccgcgtccacgcgcgtggacctctcgcgccgcctgacgcgccaggtctacgtcggcaccatggaggtgtcgcccgacgccgtgggcatcgacaagccggcgccgggctcgctcacagtggcggtcaaagtacgcgcgctcacgctcgactcggagcgcaacggcggcggcggcctgcgcacgtggcaggagtggcgcacggtgcagcggctgctgtcactggagcgcgaggcggccaactacgcggccttgaacagcaggaacagcagcagcgcgggccgcagcgtgctcgaaggccggcgccacatcgtgcgctactacgccacaagcgtcgagagcgagtccttccgcctcatcatggaattctgtccgggcggggacctgctgtcgcacctcatcgcgcgaggcgcgctcggacccaagcctgccaagggcgtgccgcagcaggaggcgcgtcgctgggtgctgcagctcgcgcgcgggttgcgctacatgcacgcgagcggcatcgcgcaccgcgacttgtgtcccgagaacatcctcatcggccggacgggagacgtcaagatctgcaacttcggcgccagcaccacgcgcgcggccgagctttcgcgcgaccgcgtggccggcaacctgcactacacagcacccgaggcagtgagcggcacctggtacgaccccgtgcgcgcggacgtgtggtcgctgggcgccgtgttcttcgtgctgctcacggggtcgccgctgctcacgctgccgttcccagagtgccgcggcttcgagctcgtcaagaccgtcgggtgtcgcggggtgctcaagctctgggggatggacaaccagttctcggcggcgaccatggatctgctcgcgaaaatgctcacggtggacccgaccaagcgcctcagcagcatgcgcgaagttttggatcacccggcgatgctggctacggctcacaccgagcgcagcctcatcgctgtgtgacgaaggattttgattttttgaggttatgactatgaggggaagcatctatctagaacggagaaggagaattttaacggcggcgcgcgccaattgataagagcgcgccgccgaactgcaagtaagaagtaaagagcggctagtatgttatgtgtcaaaagataataaagttgaattcaaggccttccgccgtgtacgcgcatgtaactggttgcagcttcggtgctgccgtcacggcgtctcgtggtgacaaccggacgcggcgtgtttaacatccgcagcgagtcgatcgaattgacttcaactgcagctcgatgcacgaagacattgatgcgctgaatccgtacatgcacatgctcaagtatcgctatacgcggcgcgacgccggaaaagctggctccgcatattcttgcatcgcccgctcgtacgtatccgacgcaaatccggcaaaattgccagcaccgcagcgctgcagtctatccactccgcatgcttaaccaagacgcagctccacacaatacgctccatgtgaacaatgttcactgaacatgcatgggcaacttctgcttgctggccagaaggtagcgttgtgtagtggccagtggccactacacaacgctaccttctttgaagcgtgcctcaattccttccactgctgaatgagtctgtctggtgattgcgtccaagggagtcattacctaaactgatacttcgtacgctgactcgtgacgaaccacctccaaggccttgctgacctgcagctggagaaatgcagacgcgcggttgcccacaaacagcggaggtcacggctttccaaggctgcaacagagagaacaccgccgcatctgatgcattcgttgacagctcgtggcgtcactcgatgccaagctggccacgcacgacgacgtgtaggcgacggtgcttgtctcgatgcaggcacacaggatgaagacggaatgtccaccgacgtctcgttcaattggcgcttgaagggactttacagcgacagcgatacagcccaacaaccccacaccaagtgggcttggcatacatgtaacccttgggtgtacaatagcaacgtccattcgtgcatagctattcgtaactcgatcgtgcttgagcgtagaggacatcgcacatggttttaatcatgacttgcccccaatcagcgattccagcctccagttcttgaagggcaaacggcgcaaccgcgaactccggacgatgcagcttcaggtagcctgtgcggcgcatagtgaccacgagctcctcgtcctcttcttgttgctcgctttctcccagctggctgtttctttcgattcgcggcagtcagaacgactccgcccgaaatgtccttgcgagcatgttcagacaaccgatacgggtacagctcgtcttcatcgacgcagtctgaagccacaatggcgcacggttcgtcgccaaacctcgggtcggcttcttcgaagagctgtccaaacacgatcgtgttcgtctcggtggtgacaccattgctgtcgctggacatgatgcgcgcgttgtacgcagagccttcgatcatgtcgtagtcctccctcacagtgatatgtcccagtcgctcggagatactgatctccatgttggtgagatagaaccaaagagcctcaaacacttgacggagcgagcgcacgcctgggaagatgaccaccgtgctccccagcgagtaaacgttgccgtcgtcgtcttcaaacaactcgtttgagttttggtcctgacccgcaggggtctgcgcgttgcgaatcgtcacgtactcgaacgcgttccgcagcttctgctcgcgaatggccagcagcgtagctcttctctcagcccagtccttcttcaaatggatgtgcgtgcgcagcgggttagagtactgcgttctctgctcccgagacaacagaaaataaaaaaatgttagctggcagctacgaaaaacgagaagtattctcattcatccctcaccatgcactccatcatgagcgactgcgctgaggcgatgcctagctgctgttgctttatagctttggttagcgccttggacttgaccttggcctgttgcagtcccgggtcggcagcgagtgacgagcccgccggcaggccttgggtcttgagcactgccacctgagcttccagctgcaggatctcatcccgcagcgtcttctcctcctcctggaaaaaagataaagaggtaaaatacggctgaatgatcggctacaaatacaggaatgctacgccaaaactggcgcgcaccttgcggatcaagtacgtaggcttgcgcttcttgggcgcctcggccccaggggagtgactgttgtctgccgagtcgtcagaactggacccggggggttggagcattaagtcacggggctgctgcatggcgagtgttgcgctttgatgaggtggaggcgggatggtaaatgacttgctacgccagtgagtgagttcgggctccgattcctattctgtctctggttcagcttattcaacacagatgactgagcatcagtatagctgacgtggtcagggtttgtcaaatcggagtcagctcttccacaccgtacgttgttggaaatcactcctgttgagtgggctgcacgccgtcatcggcttcagcagaagacgacaatgttcaccacagcataagcacaatggtgatgtcgtgatgctatgaatcaacgattgagttaaaggatatccctcgtagctacatgtatagaagcaagcgtaagttatgggcagtttcgtgcaggagctttttacctcagattcgagcgtacaggatctcgcgcatggccttgatcatcacggcaccccaatcggcgattcccgcctccagctcttgctgagcgagcgaagatactgggaattgaaagcaatgcagcttcaagtagcctgcgcgtcgcatggtcacgactagttcgccactatcccgttgcctgctcgctgtgagcacaattgcgcccgaaatgtccttgcgaacgcgctctgatggccggtaggggtacaattcatcctcatcgacacagtccgcggccacaatggcacacggctcgcctccaaaccgaggatcgcccaggtcgaaccactgcgtgaatgaaatggtgttggactccgtcgtcacgccattgctgtcgctcgaagtgatgcgcgcgttgtacgcggagccttccaggacgtcgtagtcttctcgcaccgtgatatgccccagtcgctcggagatgctgatctccatgttcgtcaggtagaagtacagcgcctcgtaaaccagttggagcgattgaacccctggaaatcgcacggtgatgatccccgtggagcaaacgtcgccgctgtccgtctcgaacttctcgctggactcgtggaccgggccatcagctgtgaactgactccgagccaagacgaactcgtacgcgttcttgagcttcgcgtcgcgaatggccagcaatgtcgctcgtcgcgctgcccattcgcgcttcagacggatgtgagtgcacaacgagtgcgaactctgcgtcctctgcgcgcaacaaacacaaagggatcatcagcaacaacatctatcgcaataaattgcaggcacgtcgcccttaccgagcactcggtcaccagcgactgagccgcggcgatccccaactgctggttcctgatggtgtccgtcagcaccttccattttggctgtggactcttgcagcactgggtccgcagcgatcgctgcatctgtcggcaagcctttggacttgagcactgccacttgagcttgcaacttcacgatttcgtcgcgtagagccttctcctcttcctgtaatcgggataactggttagatactagttcacactcaacagagagtttggacacatgaaggcgcagcacgcaccttgcggatgaggtacgtgggcttgcgcttcttggcctgaggctctgcggactggctgctgtcggtggaatcgtcggacatggtggcaggtctgatctctctcggggcccgcggcattttctgttgttgttggaacctgaggcggacaagtcccagaaaggtaaacatacagacttcaaaaatgattatgcctatcatgctccagtcggctcctcgtcctgcttcatttttagttctcactcgctgttttaggagtactgtacagtacctcgcgcatggtcttgatcatgacattaccccagtccgcgatgccgtcctccatttcttgttgtgcgagaggtggcatggggaatccagggcgatgcagcttgagtatgcctgtacgccgcatcgtgacgacaatatcgtcgttatgggtagccgttgagcctccttctgaaccagccccgcccgcgccttgggtcttctgcctgcttgttgtcagcaagatggcaccagaaatgtctttgcgaacatgactcgacgagcgatagggatagagctcgtcttcgtcgacacagtcggaggtcacaatggcgcaaggttcgcctccaaaccgcgggtccccgttttcaaagagctgcatcaagccaatcgttttggattcggttgtgatcccattttcgtcgctcgaagtgatgcgcgagttgaacgctgctccgtcgataacatcgtagtcgtccctaacagtaatatgccccaggcgctccgagatgctgatctccatgttgttcaaatagaagcagagtgcttcatacacttgtcgcaaggacttgacgccaggaaaatgaatcaccgcgatgccttcgaagcaaacatcaccgtcgtcagtctcaaacttttcgttggactcgcggtcagcgccgtcggccatgtggtggctgcgtgttacgacgtagttgtaggcattcagcagcttttcgtcccaaatagctaaaagcgtagctcttcgctcgccccagtccttcttgaggcagatgcgggagcatagcgggtgagaatagtgggtcctctggtcacgtcaaacaaagcatgggaagacacgtcagataacctccaagacaagcacacaataattaagttaaccttaccgagcactccagcatgagtgactgggccgctgcaacgcccaatttctggttcctgaccaagtctcccaacagtttagtctccccttggacttgcagcaggtcgactggtattccttctcgtgcggatacctcttgggtcttcagtgcactcacttgggcctccaagtgcacgatttcattgcgtagaaccttctcctcctcctgtacactgtgagtccgcacgttttctctaaaattctacaagccaatgcactaaactgaccttgcggacgatgtacgtgggcctgcgcttcttgactggcaggtggcccggcgacgggctgctgtcggttgagtcttcgtgcggggtgcgctcggacgcgctggaacttcctggcatagcgagtgtgaggtgacttgattgtgacgggagttgagtgtttgcaacaaagccagggtgatctaaatgcttgtcaaaccacgggatcagctgacagaggagtctattgtgatggcgtttagtgttgttggagttgtttgcgtagtatttaggctgggggccaacggcattttgcaaggatatgaaggcgcttcgcgtgcttttggtggtccccagcagattacaggttgaggcggagcgtcttgcccacgaggttgcggcggggctgcttagtcacggtgatttgcacggggtggaagggcttcgacttggcagtgggggagacgctgagcgcgcgcttgccatgggcggtggcgctgcgcttctgcaggtgcgggtgctggtgcgcagccgtcgactcgctgtggttcgagcagtccatgcagcggcagtgcgacgtgcaggcgatgccgttctggaaacactcgcagtacttcttcagacacttggacttcttgcagcggcacccgcgcatcacgaccgcgctagatttctgtcaacatcgaccagtatcaaccattagcaggaatcccaccagacagacattgggaggaggagtgttcgtacctgcggcaggaggtgaaggaagcccgtggtgctggcactttggggcagcgacgcgaaggagaaggcgcgcgggtcgttggctaaatagttctggatggcctccacgcgctcggtctggtgcttgcgtccgttcttgcagtcgtcgcaggcgcatccggcgtggcaaaagccgcgggagctgaagcacatgcagtacatcttgaggcagccggtcttgcagccgcaactggtggacgacgacacacttgaggcctggatctgctgcgcatgtcgaagcagcaggcgctgccgcttgtcctccttggccagctccggctcgtgctcgaaccgcgctgaggtctgctgcacgttcgacgagcctggagctgtcaacttggagtcgttggctgtgttagtttgaggtctagaggcgtccaggctagtcctggacgtggaaggggaggaggcgatccccgtcttaagcttcttgcggtgaggcaactggaacaggttggcggcctccaggtcagtgagacacacgggcagcgaggagtcggggccgtagcgcttctccaatagggccagcatcatgtccatccaggccaagttctcgctctcctgcgcctctgtctgctccgacgaggagtgcgggctctgcgcctcatcaactggcgtggttgcagcccctgtgcgacctgtttcctgcccttccggtcctgtagatgtgtggagtgcgaccgtggcctgtccgagcgatttcttggcgtctactgggctctggaggtcgcgcgcggatgcgttgggctgcgcgcgcttgggcgcgttcactgtgggtctaggacagttgctgtcgatgctttgcagcgcgcgccggtgcttccgcgtgctcgagtcgcttgagacggagttcctcgctttggacggcggtcctgacgcagatacaagcgactttgctgagattccgacatgctcggggtcctggttttcctgcgcgtccagcgcggtgcgtggggcgacgccgcgtgccgtgggggcggagcggagggccatggtatgcgcggcacaagggagctcgggaactgatctggcgccacctcggcgcattttcaattcaaacttcgacttcccgcgaaagcacgggattggctgaaaatatttcacttggggtttgtatgcacgacacaacgaacgcccgcttttgcacatgagcatacaaacttcagcattaaattcaaatgacccgcccaaaggtgggccctacccgtttgtgaggaggtagggcgcttctaccctgaaatggcttgctgcgtctaatggtacagtccgtgctaagtctacgcgagcgccgagccgcgcagacgcaggcgcttccacgtgttctcgcgcacggcgttctgcagcaggtcgtagatctggttgcagccctcggtggccacctccatgaggctctcgaacagctccagcggcagcttgcactccatctgcagcaggttgagcttctgcgtgcgcggattgagcgccatcaccacctgcggcgcgcgcgccacctcctccgcgtagttcaggtctgccacagaatagaacacaacaccattagaccactctacctcaattctaccgcgttctaccgcattctacctaccacagagcatggtctgctgcaagtatccagccgacgaggccaccacgaagtcgttgagcgcgatgcccgcgtcgatcagcgccagcgtgatggcgttgatgctggccggcagctcgccgccgtccgcgtgcagcacctgcacgaagatgtcgatctgcgagcgcgggtacagctgtgtctgcacgcaggcctcgaagatctgcttgacggccagcgacatctcgaccttcttgcggtcgccgctgcgctgcggcttgcgctccgacgtggcgaaggccgcctgcgtgaactcgcagttgacgacggcgcgcggctgcgtgttggacgcggcgttgcccgagcccgttcccacggccgccgcgccgcccgccgggccgacgcgcagctcccgcgggccgtagaccaccgccaccaccttggtgttgccctgctcgtagtaagccgacccgtccacgcgcgagaagagcccgaagcgcgtgcggatgcgccgcacctcctcgctgcgtcgcccgtccacgcgcagcccggccacggagatgaactcgccgcttgcgccgccgccgccgcccagcacgctcgcgctacccgccttggccgccatgttgctctcggattggttttccttggctttggtcagccgtacttaattgggggtggtgactaggaagtcaaagagaagttgaagtttacattcactctcgatttttatgcattccgggaagacatataaatgttgaagctaacattcactcccaggttctggtgaagctgcagtatcggcttctgatgcgcttcgcgatcccctgcagtggagcagaccccggtgcacgtaccaaggccaggtctgtggacatcactcccaaatcggacgtttggctggcaccagttctgggcgctcttgagcaagaagagcgaggctatcaccgttcagctggaagttcaacagcggattgcgctaggtccactatataccatcgtacagctccactcactatttcgtttctggttacacaggagatcctaatcgaacttgaccaagaaggcgagcaagaactgcggcatctacaactaccctggtagcctcacgaccccgatccgatctcgtctgccgacttcacccgtcttcacagggacttggtggagtaccacatcacggtcgacggcaacaatgcccgccccgtgcagcctctgaacgaccgtaagggcaatatgtggcgtaaatgttgttggcttcgcctggtatactctgcgtagaataaatcgactttaatgcgtttgaaatggacgaaagcgactgccgcttaatattttactacgcagtacactgcatcttcgctagagcttcacgagacgagcccgaccttttggttggcggaaaagtacacctgtgttttggcccacgacgccgtgtccgggtagatgaatatcgggtagagagtgttgccatgagaagcagtagagagcattgactgctcgttgtagtcgaagtcgaacgtcagttccgtgtcgtactggtccaaacatgggggctacggcatcaaaatcaagagattaccaggttttagtgaacatggatgggtagtaaaattcaattcagcgtcacggacctcgctgcaataaaaccagcccaagacgtcgtgcttctgccacgagctactggttgacgtcgtgaatccctacaagtgcacaatcatctgtcgagtcagtgacttccaccaccactaccaccatttttcttgctaataacgtaccacaaatgcctcatcggaatccagcctcagtgtagctgacaaattgataggaacggtcaaaatgggcgtatcggtcttgatgccttcatccataaacactactagcgttccaactcttcgaccatctgacacgtctttgatgaacttgggcaaattcgtggtcgctgagaagtaaggaacgtagttatactgcgtcaaaagataggtgttagtagagaagtattacatcgcatagcaagtgcacgcgtgtcatctgcaactccgtgtagtagcgtattttgacaatgtgcaccttgccatcagcgagatcatggacagcagcggcagagattccagcgcgttcggagtccgtgttgctgctttgacctcgtgagtaaattgcaacatgatcgtaaaagacatcatctccagcgctttcatcgttgagcctagtttcaaatgtgatggcaagtgagttgtgtagtccggcaaaccccatgctggaaccttccacccccagtgtcgccgtgcggttttggtgggaatgtatcacaaatgcccaccatgaaccgcacagctttggtactcgtggatcccgaagttctggtattttacttcgaaacagcgccgagactggtcggtaatctagaaagtgaaccgtgtctcgaagccttgcaacactggtagctgctgcgcgtaccaaattgaagaaacttggtgcggttgcgaggctgtgaggcgtagacgctcaggacatcgaagtttttcctcgctctcctgataagcgccgcgatggccaagcatagccgtctccatggcgacgcgcgcgcttgtcgtgcggttctcagtttcacgagtctcaaggcgaagcgcttcttgctgctcggtcaatacaacttccagtgtggcttcgcgtgcatcattggcaccggagaatttcgagtacgcagtctgacccgtacagtataagccacatattcatctaatgttgaatttagcacaaaagagagcgaatacatacacttgggaacgatgcgcagctacttgtagccgcttttccatttagaactaacctagttgtgccattgaagtcgtagtacacgaattctgcacgaacgaaccagatcggcgtagacagaaagagtaagcaacgtgcaggggggggcagctaacagtaaaggtaaggctgcacctgctgcgactgcatcgacgaagaaagcgaccaacagcgcaagcgcgcttgatatcctcatgagtcgtttgtcggtagatgtgaccaactgacccttcaaagtctcagttgaaatcgaaaaaaattttgttgattcgtgcgacagtggcgcagcccccccccccctgggacgtcggcgtaatagtcgagttcctccagcgactcgatgtggcccgtgaccgcgatactgccgggggccaaggcgtcggcgctgttgtccgccggcgtcatgcacaagaactacagtttgccgcgccgtgcgcaatcacatcaaagaagttgaagttgaccttcactcgcgatttctaggcacggactcgtctcgtcaagctccggtagcgcgacagcttcaacttttatgtcttcccggaatgaccctttggttggcaaaaaagtaggccgatagatgaatatcgggtagagagtgctgcttgtgaacacttcatgacagtagagcagccacgtggtctggttccagggccggtgcgctcaccactcgcgccgatctcgggttggcttttgcttagtttgggtcagcagtaaagttgaagttaatattcactctcgattaagtaatccaggaagtcatgtcaatgttgaagcaaacattcactcactcactcactcactcactctcatgcgcttttcgcttcttcatagcaggtgaagcagtagtatcggcttttggtgcgcttctctttgcgatcccctgcagtggaatggaccccggtgcacgcaccaacgccagcgacgcacacgccttcaattcgtcgtcgcccatcaccttaagacagacgcggcatccttacctcgcctcgaattaccggtagctccgattgcctgcgcagactcaaatcaccttccaccaggtccatcgagtgcccggacaacgacaccagacccatcagttgcatcgccgtggttgcgtctacgatttttgcgttagaaatggggcgagtgaagtacgtaaacgcatacgagagcgcactttgcgttggtgcatctgcaacacgcgcaatcgttgtaaacgatcggcataaacaaattctcccggggattcttgcagacccatacagacgcgtatcacttggttgcacgacttctgatgcagcgggttttcaggagaaaacacatacgcaggcgacaactcggttgcggtccgctcatcgagcttagcgtcgttatcgtcatcggccactcgaatcaagatcatcgacactcccatcgcatcctcatccgccgactcatagttcgcttgatgcaatgccttctctctcagcttcgacttccggaacatcggaatcaccagatagaccccattctgtttgcacgggaaaatgccagcggcgtagcgcccaagcaaaaaccacagcgtgtcctcgttcggctccagttccagcgacacgaagtgggagaagcccagttgccagtcgctccattgcgatcgccatttctcaaattcttctcgtattttctttcgagcaactgcgttgtcctccttcgttacatgaatttccgccccgccagtcagcatctccatgaacaagcccacatttatgaactgaccccggaacgtgtggtggcttatgacaaccgtggaatatgacttgttctcctccttcatcacacaaccatccattgctaagagcaacaagatacgagccaccacctctccagcaccaccagcgacaaggtctttgttcagcagcaacttcttgagctgcggtagaatgcacttacggaatactggttccaccgagtgccatacgtacgcggcgccaagtgacaccaccgcgtccgacgcataactgaccacgtggccgtcattttgccaattggtatacgcgagaactgccatgaaatcggcaacaaaacgcgatgccagcggcgaagaagcgcgaaggcgcacgcccaatcggggcagcatggacgcaacaccaaacatggtaccgttgttgtagctttcgatgtcatctgggtcgcaccccagcaccagcttgcgcgctgcaagtctcagcacgtctactgagttaccagtcgtgtcataaatgcttgtccacagagggcgccccattttcacgagatgaccccagttctcgccatcgctctgccaaaaggcgtccctgtatgcagcgatctcgccgtcacttttcgtcgttgaattcgtagataaagcatcgtgctcgtgccagaagacgtccgtcgtgtcggaaagcacgaacggtgggaatgacaactgagggccgtagaaggagttctgggaggacgatgacggagctgccaagtcgacaaccttcgcgttggtatcaagcaacactccaaaaatgcctcctgtgaacccttttgagcgagtactgacgaggcggtgcggttgtttgctgtgcttagagcccgcccaaggagacggaaggagcccagctcgttcttagagcggagcaacagtccagcttcgtccacagtcaagagcagcaaccgcgtggacttggtgctgtcctgtgcgaatgcctcgcactttgtctgccatcctctgtgacttccacgcagctcacgctccagctttttcaactcgaggctcaagttctgctctatcgttggagactgtagagtgaacaggttgagccacttatctcgaccatcgtcccaatgctcctgtgcgtagatgtagatggtgaccaggcggtcgatcagcgcagcttcgtccgcaccgaagagccattgctgcagcgttggtgtatccaatgggtagccagttgatccttccttacgacgacatgtgtagagtactcccatgcatccttcctcctctttgctcgtagtcagtgctaattcacgtacgagtcgactcttgccgaagccggagctctgtacccttgacacaatcggcgccgtatacttgttagggtagcgctggtactccttccagcacctctccacctaggctcgaaacctggcaggagcggtgccacgatactcacttcggataaacgcacgctcgagctgctcgaacagacgatcgagttccgatgagtagagaagagagctcagtttacttaataaagcagcctcgatctttggcgccaccttctgcgtcacgtccagtatatcctgccacgagaattcactgtaaacgctgtagatatccccccgaagcgcactctccacaagcgttggggcctttatcgcaagtagatatctttcttccgccacttgaacaacccgctgctcgctcgcctcgggaaacctaggctgcagcaacgcgaagacctccgcacttaccagctccgttaggcttaacgacatgcctcaagtcgaaatggaatttttctggttaagagattgtctcgattgatggaagctaggtagctggttctttcactcgcagtaaaaaaaatcccaatcatctttccttgacgctacttggttttactcttcttcttcttcgggcggattttaacatcgaatgacgggacttctggtgcgcttcgcttagcaattctttgctcctcctgaatgggctctggcgctcgcaccaacgccaacaacgcacacgtcctcaattcagcatcgcccattagtttcgacaaaggcggcattctgctctctcgcctgacccggtccgcgaattctctacgcagacttaaatcgccctcgatcaggtccaccgggtagccaaacaatgacatcagatccatcaactgcctgcccgtggctgcgtctacgatcttcgggttgggaatggggcaaacgcagtacgtaaatgcacacgacagtgaagaagccttaggtgtacctggacactccaccttggctcccaatggtacagtcgactgcgtggggaggtcgcgttctacgcgctccgcatacacgaactcttccgaggcttcttgcaggcgcatacagacgcgaatcatctggctacacgccttccgatacaacggattgtctggcgaaaacacagacgcaggcgacaacttggctgcgtcatattcgccacggtgactgcgatcctccactcgaatcaagaccatcgacacctccatcgcctcctcatccaatggcccacccttcatcgtcttacgtgatgcgtcaacccccgactgtgacttccgaaacatcggaatcaccacatagaccccatgctggttgtgtgtgaaaattccagcggcgtagcgcccaagcaaaaaccacagcgtgtgctcactcggctcaagttccaacgtcacgaagtgcgagaagcccagttgccagtcgttccattgtgatcgccatttcttaaactgttttcgcgttttctctttggccaacggactgccattctccttcacaggaatttccactccgtgctttgtagactccagcgtctccatgaacaaccttacattcacgaaccgacccctgaaggtacggtaatttaactggaactttgcgcccgctttcgctgctgcaattatccctttgttctcctcttccagcacgcaccagtccactgccagaagcaacacgacacgagccaccacggtttcaagagcaccaccaacgtcgacttcttcgttcagcagcagcttcttgagctgagggagaataaaccgacggagaactgaattatgcgcatgccacacgtacgcggcaccgagtgacaacactggatccgacgcgctgctgctcacgtagccctcgttcgcgcagtttacatgcgcgagaatggccataaacttattgacggcacgcgacgctaatggcgacgaagaccgaggacgaacgcctagacggcacaacaaggacgcgacaccgaacatggtagcttcgttgtagctgttgatgttttcggggtcgcatcccacgagcagcttacgcgctgcgagtctcagtacgtcacccgttccgttgcctctttcgtttgagtgaaagattccagcccacatgggacgacccatggttacgaggtgcttcatcctctcgtctttgctctgggaaaggatcgacttgtatgcagcgatcccatcatctgctgttgttgcacttgttgcggcgttccacaagacatccatcgtatctgagagcacgaatggcgggaacaggaactgtcggcccacactggaatacctggaaaaactgtaccgcaagaacgcgttgcctttgtggtcgacgcgccccagtttgtacacttcagggttcgtgtccaccaacaccccgagaattcctcccgtgaaccctttcgcgcgagcatccaccgacgcaatgcggcagttggccttgaccagagctcgctgaagaaggcgcagcggattgagtccattcgttcgagacgaaatcaacgttgcagcttcgtccacggccagaatcgccaaccgcttggacgtggcggcatcctttgtcaatttctctaactttgtcgaccactcttcaggttttctgctcagtcttctctctaacttcccgagtcttgttgccaaatgcttatcgagcggttgaggctgtttaaacagctccaaccacttgatccgaccgatgttccaatgcttttgcgcgtagatgtagatagccacgagatggtcggtgtgtgtgctgtgtgtgcttgctggtgccctgtgctgcggtgggacgtcaaggtcagttcgtatgctgcgggaaatggctcggcgagtctgtcttcaagttgtttcattgacatacagtcgagcaagtctcggtcaaagagccattcctttagctcgggagtcgccttaggatacccggtcgattcctcgagccgcgcgcatatgtagagaacccccatcgaccctccgtcttcatcactcgtcgcccgtgccagctccagcagcagtcggctcttgccgaagccggagctctgcgtgatagccacagaggggcttcatagtcgtcggggtggagctgatattccttccagcatctcttcatgtaggctcgaaaccttttgggtgcagtgccacgatattcagtctcggtgaatgcccactccagtcttccgagcagggtttcacttagttccatggggagtcggacgctagtgtttcttttactcaaagcaaagcagagactttttgcagtcttctttgccacatctccatagaccttgtacgggagttcgtcgtaggttttaccaatgatgtctacgagcaggtgcacgaggcttcggaggtccttcatgacgtgctccttgatatcgctctcgtcgcgtttagttagctggatcgagcgctgcttgatcccctcgggaagcttcggctgcaacagcttgaacacctcagcgctcaccaactccgtcaaagtcattgccgctgtcgtccacgtaaatcaatcactctttgctgcaaagggtgctgggaccttcggggatcccatgaaacggatttagctaagagatctcttgtcgtcagaggtcaccagcactgcgtaaggtctgctgatggtaggcgtggaggtggcgtccttctcttctgtcgacgggccgatccgatccagtaaggagccatctccgcactcgagcttggacgaccagcagcaagcgatggaggcgggaggtccgaccgacgacgagtggacagtagacgcgtctggattcggcatccccggcgggactttgcagctcgtggaggtgccgagacgacgatggagacgccccatggagctgccgctgcctccgtcgccggctgaagcccccattctccaggagttttcacggccgtggagagctctgcgtctccccgttcctaccagttccagcgaggaggaggaggaagtggaggaatcgctgctgaagtgctactacccgcagtactctcctccagagccgacctttgcgtcggaggtccgcatgccacctttcctggaaccgcgcgtggctgtgccagagtcccaagcgttcctggtcatcccccggattcgcttcacgctcggaacggttagttgaatacttcacccaaaagtatcgtgttgattttcactgaagtgttgcagattgagccgctggtgtgcaggatgttggtgtatgacgttgcccagagctgccgcgtgactgaagagttctgcttccggatccctggccccatgctggacaagacggactgcacgatacccccggcggcgctcatgtatctgctgccgatgaagagtccgtacctggtcctgaaagtctccaaggtgctggtcggagatggcgatatcgcgactgcgccctactgcgcgcctgacaagtttgcgtcccctgcggagcagcagaagctggtggacaaggccgtggactgtggaatgcgcctgggtcgattccagcagccactggcgtggggggcgatgcccctcgtaaaaggagcgaagcagtcgatgactctctacagacaacgcgcgtgcatacccgaggagcagcgtctggcgctgattttggacaccatccgaggcactttgaagtgagtattcgtccagggccaacttgtagccaatgtggtatcatttatcacgctgatgtccgtcattctgctgcgtgaaacagggagaaggtcgtcccagcgtcgtgcgagttcgacatcgaggacgtctcggcggaggaactgtcgatctcaaagttcaaggcgtcagacaatcgtgataaagttccagttcgactggaaatcctcgatccattctccgagcagagcgtgcagacttgtggtaagcaagagggtgcctcgagcgagcagcaaaatggtgacaagattctccagtgtcgagaagttcagccgttgtgtccgccgtccttcgtctcggcgtctggcattgcggcgtcagggccagtggcagtctcgtacgtcaacacgctgtatctgtacccgctccagatcgagaagtgccagtaccgcaacgtcgctatccgagttcagctgctgcagagagaagtcgacactgtgcgtgggctggaggagacggaggatgctgttctacgagcggtttaccgagccaacaaccaggttgggcggtccgcgtatgcgctcgtcgggtaccaccagaagaacccgcagtttgaggacgagatcaagatctgccttccagtatccttaacgacggagcaccatatcctgttcacgttctaccacgtccactgcaagaaactccagcccaaccagccccagcaagagctcatcgggtacgccgctctccctgtctcgaggaaggacggcacgatcatccaagatggccggtatactgtgaacgtcactcctgctccagtgtcgtcaaagccgtcggcatctggaggagctatctccctatcccccggatacgtcggagccgtgcgagacgcagttgtggacaacacgaagaccgtcttcagctgtcgcagtcgcgttgtttcctcggtccacagtcaggatagtgcgattgcagagtttctgagtccattccacggcacccggagaacaggcgcttccaaggacgccgcagccaacgaagacgcgatcgtcaagcggctggtgggtcttgtccagagtgacgcgtcaaatctgcgctactatttcttcatgatcgccaagtttgtgcttgggtacttgcggtacggcacctcaatcgtccggtggtctgcgttccgcacactcctcgccgtcatcaagaagatcacgagtgatcctcagggcaaaccgaaaagtgacgaggtcggccgagtgcttcagtacgtccacattgtgttcgacgagagatcaatcgatgatccaatcgactccaagtcgccagtgaaacgtgaacgcaagtccgtcttcggcgcgctgctcgagacgtggctgaatgtgctaaacaacaagacctcgatcgaggaaaacaccgacacgctggccatgtctcgaacgtactcgaaagtgctcctccagctgattttgaagtccatggcaatgaccttgcttgaccagcgtgactcacctgatgcagaggacagctcgctgccgatattgctggccaagaacgacgaggtggtgcttgagcgggtgctgatccaactgatggcgtacgcccgtgatgacccgtcaaaagatctgaccgtaaagaaagatgtcaactcgagcgtggccttcttctgccgcggcatctttctcatcgtgaagaacgcgttacccgctcgcgtgatcgaccgctgcgtcaagtggatcaatgtccagggcgacgcagcgagtctgagcaacacgtggttcccgttcctcaccaatctggtggcgtttgagtttttccccacgataaacggcgccgtgccagctcaggacagcaatctcgcgaaaagacgagcctggctagccaaagctgtcttcgtgaagctgctgctcattgtggacaagcaaacggagcatacgactcgagtctgggcagcgcgattactgcgctggatgtttgcagtccaagcgtacaacccttggtatcaaagcccagagcgtcaagagagaatcgcgcttctgtactacccgttcctttcgagcatcgtacagttcacgacaccaggaaaactcctcgcgagcagagtaggcgatgacctctccaacacgttgaatggcgtactcagtcctgcgagagcagcactggatctccagaaagagttggtgggttgtgtcggccaccttctcagcagcgtgtcaagcttgcatctgccgttgttcttccagctcaccaacggaagctccgagcagctgagctttactgaggcattgagcttctaccatcgcgtggtaagttactcgctgtttgaactgagatgccgtcagcagatttactaaccttggactccaaatacacgtgacagatatcgccatgttctccggaaacgaatacagccgccgacaacaacagtgatgcctccgatgaaagttctctaactgcaaagagctcgctgtacgacgaaggcagggtgcacgccaaccttgcgtgcatgcagcgtatgctcgagatattccttgttggaccagagacgacgagtgatgaaccgcttcgaagtcggcttctcgcatcgactgaaattgtttctgaagctcaatcaaagcttcatcggttggaggagattcaacgccacaactttcatcgtcgatcccggggcgccttggattcgccaacgatgctcagtgcgaagcccaatcctatcgacaccaacactagtcccggtgacacagtccgaaacgcaacggatggtagcccactgcacagatcccttccgcgaaactggagcaaacagcacagcagcatccaacagcgacgtagcgcgcctacagtcggggtagaggagaaagcgccaccgactaacccaggacaggacggtggagttgacgggaagtatgacgaagagattgccgctctacagcaagcagtagcaaccacagcattccgagctattcagaccgctgtggacgagtacgaaggtgttcttcggctggtcgaagtcgcgtgcacgcctcgcttcagctcagataataacgactcgctccacggtgtctccacgaaccaggcactcgctcttctgggctacctcaccgagttgttgtttcagctcctgcaacgggcgagcagcattaaaggtctagctggtgagttagagcaagacggagccacagaccaggagcagcagaacgacgacttcaacgccaatgccacctcaagcttcgtggtcactctgctgcggtacttgcaggcgttcgtctggcgcttctcggcggctttgttcgcgacccgaatccctggactcccggctgtgcatgaccagcgccggatccaactgctggtatcgatcgcagctacagcaacaagattccaagtgcgaagccatgccgcgatgctgctgagccagcttctagccgtctgctacgagcaaacagggagctttcagctcgtgaaggggccgatactcaaggtgctgacgtcggtctttttcccgctttcaggcacaccagacgcgtcgttgcagatctccactgccgcattgagagacttgctggatgagatgcgaacttttgccgccacgtcacgagacaacatcttgtcgctcccgttcagcttccacgcgctgttcattgagctgctcaacgaccttaccaccaaggtgcacgcgttcgagcgctggcaaggcgcgtacgagaaccccgacggcgcgcacgacttcgaagagattgaagagggtatcgaccgcgtcgtcgacgacatctcgccacattggcttctccaagagaagttgatctggctgaacgcgctgctgcgtcttcacgagcgtcgcgagcagctcgccgaagccgcttgttgtaaagtggcaagcatcgagtacgtgcagcgcgcgggtcttggacacggttcagacagctcgcacttcggtcgcttgcagcagtgggtcgtacgcgagctgttcgaagcgcgcaggtacgcgaaccgagcggactggatcgagaaggagctggccatcagtgagttgctgctggtggcgctcaagcagcagcggcgcttcaatgaataccaggagacgaccgagtacatgggcgcgttggtccgccgcctcgccgacagggacgacagtcagcacaacagctcgagcttctccttctaccgcgtccgcttcgccggcggttgcgtgccgacgttgatcgccaaagacgagttcatctacaagcggagcaagttcacgtcgctcggggagttcgtaggcgagatgaagaccatgctccgcgccaagtacccgcagtgtgagcgcgtcgacgtcgttccagagccgaagcctctgacgggaagtgacagcaaccccaacgtcatttacttgcgagtcaccacggtggaggaggcacttcccgaggagctcgcgcggctcaaaatggcggagccccgcagtcatcactggcgcgtggcgttcaagtttgcggtgcccttcacgctgggcagcgcgtcgtcctacggcaagacgtccgagcagatgaagcgactcacgttcctgtcggtggcacgcgcgttcccgtgccgactgagcaggcagcgagtgcgtctgcgtcacgaggaagtccgctgccccattgacaactccatggacgacatccagaagcgctgcgccctgctccaagctgagatcgacaagggaagagtcggcaagacggacctgaagacgctcacgctcgtgctcaagggcagcgtggacacgcacgtgcacggaggcatccccgaggtgctcgactcgttccttgccgctgatcctgcgcagctgcagctcgtggatgctgaaggccgagccatgaacgacagcgacagcgcgcggagacgccacgagctggcgaacctgctcgtcgagtttgcagacctctgctggaagtgcctcaagatcagccgcgacgccttccgaggcgcagctcagcccagcagcggcagtcagcacgcgacgcccgagctgtttcctcagcaccacttggagtccaaggacctgtccagccccaacgcgccgtccgagagcttcctgccgccatttagctccccaccatcaatggcaatggccgtcactcactccaccgcagctccagcagctcgcccaccagattcaacctccgtctatctgctggaggaagtttctccgctgcagtccgagttcgaccgcagcttcgcggcgctcgtggcccagctcgcgaccaagatcccgttcatcttccgccacgccgccagactggccgaattacaccagcagacggcatgcctgcgctcctccaccgcgacccccaccccaagtagaaccgcctccttccccgccgccgtcgcgccactgcccagctccatctcctagacagacagacagtgtaacaaggcacaaataaagacgacgagaacctgcgtggaaatcaatcaaaagggggagagaccttgttagccttctacgcctactaccctctctctctctacggtagggtctcgcttggcgtctacttgccgccgcccagcagcatctccttggcctggttgatcttggtggccaggaacgtggagccgcccgtgtccgggtggttgaggatcagcagcttgcggtgcgcgttgcggatgcgctcctcggacgcgctctcgcgcacacccaggatgagcgcggcctcgcgccgcgtcatcttctcctcgaagggcccgtcgtagaagttgcggtacttccacgagctggcggccttctcgctcttgggccggttcttgtacgcctcccacacctgcagcgcgtacttggcgcccagcgccgcgccggccacgcccagccccgccaccagcaccgtgttctcgcgctgcgccgacgcgtggaacgcgcgcgccgccagattcggggactgcacgggcgtgtcgcgcgcggaggcggcgctcgaggcgcttgccgggagctgccacgcctgcgcggcgcgcgaggagcgcgcgagtcgtcggaccagggccatcgtgtgtgtgtcttcgtgtgtggcgcagaggaggaagatgatggataagagtgtcgtacttaggggggtgatgaggatacgtaaaattggtgtggtggccgacgaccgcttcaacttgcgtgccggagtcgcccgccacctacggcgcaaggatttcccgtcgccagtggtgctcctcaggctgaggtttggttgcggcgcactcgtgccgctcgtggtcgttgctagctacatgtgcatgtagcagtttcggtcgccactccagaagccttctgtcgaaagaacgatggaccgagaggagtgaactgaactgcgtggtcgtggcttcagttaatgaacggctgcacgattgaacgtgtcagagcaagtcgcgttggcgcattgccttattccgcgaagcttataagtgctcttcgactcgctcggcactttctcttttatcccagcggagagagaaaagtacgaatcagctatgcctggctgaagcagaaaccgacgacgggtaccatgcacggtacaaactctcggagacctgtagcatgcatgaagtcttcgagagatcactgtagggagtaacctcgtgagtctttcctctaaagagatagcagatccagctactcattgttgttcgaatgctctgcccgatgaagctgagcgaccatgtacgcagccaggccctggcccggggggggggcaccgtgaaaggatatcgagttgtccaactggccggtgaaatcttgcgctagagatgcaagcaaagcttgggcaagcaaggccttgtgggcgatgggggagccgctgcgctctctccgctggttctcgcggccccgcccataaatcttcttgcccccgaccgccaccctgcgagcccgaccgcggtccaagcagcaaaacagcatgaatcctcccccgctcttccgcgtacgtcgacgcctcggcgacgcgctctacggtgaggtgctcgagtgcgagcttcccggcgacgacgaaccggtcgcggtcaagtgcatctcgctcacgcgagcggccgaagcccgcgtccgagcgcgtgcgacgcgggagatcgacaacccactgcaggagcagcgcgtggcggagctcatcatggccaacgggggccaccgcaacgtggtgcagccgctcttccacttcactcacgacaggagactctacctcgtcaacgaactctgcggagacggcgatctgcactcactcgtggcggcaaggatgagcgtatcgtccctcctggaagaacatgaggtgctgccgttgatgcgccaagtactggaaggcgtcaactacctgcactcgacactcggcgtcgcgcatcgggacctgtcgctcgagaacgtgctgctgagtcgcggggcctgcaagatcacggatttcgggctgtcgacgagcgctcgatcgatgtgcgaggctggccaagtgggcaaggagtactacatggcgccggagatcgtcgcgggggagcggtacgaccccaccttggccgacgtgtggtcgctggggatcatgtggttcatcatgctgacgggatcgccgctgcttctccgtccgaaagtgcgtttggagctgttgtcacccacggcgtcggtgctgtgatcgaggtgtggggccacgcacatcgtatctcgagagacacaatctcgctcttggaaaagatgcttcaggtggacccatgcaggcgtattgcgcttgaccaagtgctcaaccaccctcccttcgttgcggctcgactggatattgcatgctcgccactggcagcgcatgagagataatgagtatttagtagacgcaggcaaaccttgtacgagccgggatacatatgtaaatgagtatgtactgacttactaaaagcttagctcaagaatactggaggtattcccgcaacgtgccacttgtcgcagtaggtctcgctgtacactcatctaaatcaatatgcttgcagaagtagcgcgcaaatcttgagaacttgttgtacttcctgtgcgaggtacattaaaatatacagccgggactagcccggggacgcctgtagcttgcatttgttttcgcttccccaacggtattgcagaaatgcataggagttgctccagaacagtcaatgcagctgcctttacctcatagtagaggtgccatcctactattgcgagaacctgcttgatgacctgcacgacgatgagacctccgtttggagtactctgccactttgccttgagactatagcaaccgtgagagtgttgcaagcgccttaccaaggaagaaattccgctgtatacataactagtacctatatacgttctgtaggagtatgtgtacctgtttccagcatccgtcaacgcagtaggcgctcgcacgaaaatattttcgttgtgcactacgtgtgcattacgggccgattcgtaggggaaaaccgggctctatccctacgagtagtgcttttcagatgttacttcactgttacttctgtgcccctatcactgcaataaaacctgctacttgagtgctgcgccgtttacggcgcagccagctcgcttgtgagaccaaaagccgctgtgataacaagacgcgaagctcggcgagcttctagaaagtcggtttccgtggcgtttcttgataaaaaaaatcatcgcacgcggtcgagtcgaggtcgctatcagagatcgagaagctgtttttgagtggaaaattggtcagagctgcagccaaacgcgttgtggggcatatcgtaagcgagtgccaagccagaggcacagattttaatgttgttttcctatacaacaacaaaataaagtaggcgcagcaacattcgccgaagcaagtactacgaccccctccagttcgtcagcgaactgggggaggtctgagagcttctagaacgcacgcttagttgcgaaaccgacactctatcgaagagattatgcaccaatttctgaaccacaaccaaccaccaacgactcatctggcaagcagacagatatagccggaaacaggcaaaagcatgctcggctggaaatctgcactcggccaaagatattttccacggggcggcggcctggggtagagtcgatcgtggtgcagcagtccgcaggggatagccatggtcctaaatcatcactgctagaaactggcagctctcgggcgtcacagtgacactgtcactaagaccagcagttctgctgcaattgttgcgaacgacaaggttatcgctcaaaagtagcttgcataccatggcactgcgcgggaggtacgtacctgtcgaaccgtggccatctcctgcgaaatcgtatagcctccgggctctacatgaggacggaacggaaaaatatttggtcggctgagcgttacgcgatctgacctcataaaggtgccgatgctatgatcacgcggactggcttgcgtctgcttgccttggctttcttgcccaccctccctccactgtcaccctcaggccgacgcattcgcttcagaattcaacttgccttcaataccgactgtcgggtccgacactccacgcgattaatgaccgctccaccgcttttccgcgtgaatcagcttatcggtagcgcgctctacggggaagtgctcgagtgcgagctgcttgggcacagcgagcccgtcgcagtcaagtgcatatcactcgttcgagcagccgaagcacgcaaccgaacccgaacgattcgagagatcgacaacccactgcaggagcagcgcgtggcggagctcatcatggccaacgggggccaccgcaacgtggtgcagccgctcttccacttcactcacgacaggagactctacctcgtcaacgaactctgcggagacggcgatctgcactcactcgtggcggcaaggatgagcgtatcgtccctcctggaagaacatgaggtgctgccgttgatgcgccaagtactggaaggcgtcaactacctgcactcgacactcggcgtcgcgcatcgggacctgtcgctcgagaacgtgctgctgagtcgcggggcctgcaagatcacggatttcgggctgtcgacgagcgctcgatcgatgtgcgaggctggccaagtgggcaaggagtactacatggcgccggagatcgtcgcgggggagcggtacgaccccaccttggccgacgtgtggtcgctggggatcatgtggttcatcatgctgacgggatcgccgctgctgtcgctggcgtccccgtccgtgaaaggcttcgctgttgtggtacagcatggtgttggtgccgtgattgaagtgtggggccacgcgcaccgcatctcaaagagcacaatttcactcctcgacaagatgctgaaggtcgatccgaggcagcgtatctcgcttgataaagtgctaaaccatccaatgtttgccagtgggattgcagtggggtagaacgaaacggtaacgtgcagatctaaagccacgttggaatggtttttgacaaaaatatccacgtttccttacaaactaatgctggatggtgcttagtatcctcctgaatatcaaagtctcgctgcatatttaaaaaaaatcgtgctcagtaacatcaaccgttgaggggggccctataatctaggattcaatggaattcattgaatccttgaacaaaatgtcggcatttttaaataccatatataataatataataaatatataataaataaccccagtcgcctctcttgctaggacaaacgggaggacaaaatcggttttacttgatttcagtatagtgtaccacaaattttgtcctagacggaccgctaggacaaaaattatggtacactatactttacttccgtgaatttcggatttgtcctagcattttttcggtttgtcctagcaaagtgcccgactggggttaaaatggtgtccaaccacaggaaaagtgtaaaccattagcagtaaagataggttgacccgaacaccctaatatttcgttacaggcaagtcttctagctagcggcgagcaaccactggaaacacggctggaagtgtttggaccgccggaacttaggcagcgtgtctctctccagcatctttgtgatggagcgctgcgccgggacgaacaacgtgcgcgtggggttgtcgaggttgctctcgatcacgcggatcagcgcgctctcgagattcacctgcagcttggctcgaccacaaatgtatttccgataaatcttctgcgcccgcagcttgaggtagctgcggtgcggaatgtccttgaactcgttgcagtccatccagaagtagatgctctcagtgcagaagctgtcgatagcaacacagcaggtcgaagttagatatacatcgctccgaatggacaactacacataatagcatacgtacatttcttctgagaagaagaggaacagcgctcgggtctccgggttctccaggatcatggtcaccgtcacatctgcttcagtcagcgctccgtcggacgctctgtcttccgcgtcatttattaccgaattcgcgcgtcgacctgtacttgaacgtggtgcgatctgcaccgagttttgattcgttttcttcgtggctgtgaccttcctgttcgacgccccgcccattgcagctagtcgtgctgctcgtaattgctggggcgtaatgcgaataccccggtagatctcgctctgttggaatttagggaagagtgtcgtggcgaagaagttgaagatctgctcctgcgccttgttgaacatggccggactggggctggctaagctgctctgcaagtctttgtggatcgcagtggacgcgaatggcacaaactctcgagactgcggatcgcagaaccgattgaagagtttccgagcttggcgcgcgaggtaatcggacgtcgggaattgctggaacgtggcgatctcgaagtaaaagtacagctcgttggcgcactgctcgcgctcgaggaaccgtcggaagtacttgcgcagtagctcgagctccaggaactcgcgcaacgagagcttagatacatcaataaacccggcgccactagcggtggcggtcgtctgctcttcgccatcgtgcgagatcgctggaggtggcgctgatggtgaggcagcgatctggtcgagcatctcctggtacaagtggctgttgcggaactttggtaaatctcgcgtctcccactgacgaagcaccaaacgctgcgcgtccgagaacgttgcttcggtcggagccgccaacttccagagaatgtctcgtcgagtctccacggggagctccagctccagccgcgccccgcgacgcacgtacttgtcgaatatccgccgcgctcgcatctggatatactgcctctgactgtgagggagacgctggaactcacacacctccttgtagaaaaagagcgtgttctcggcgccttgatcgcgcagaaagtctcggaaggcgtgcacaccggcgccctccagaatctccgcaagtccgatgggtccttgcctattgcctcccgttatcacgccgttattactcgttactgcagcagccactgcggtgggtagagatggcgtattcccatcagtggtagggtcttgagactctgggagcgccttactagcttccatgacgcggttctgcttggtcgtaccctgcttctgttgcttcttttgcttctgcacctcagcttggtacgataaatacgccaccgtccgatagaaaggatcaagatgagattgtaccagctcagcactgcacagcagcacagcatcgctgaaaacgtccgagccaaggggatactcgatcaggcgctccaacaagcggtctttgacggcagtgcctaagcaaacctctgctttagacccatagcgaacgtatttgttgaaaatcttgtgagcctgacgaacacagtagtcctggtgtgactccattgaaggagcttcgtcgtcgctctgcactgccgttgatgtccctgaagtggcagttgatacgtcgcggttctcgggtacgactaagagcggatttgtcgctgcatgcttcagtgtattcaccaggtcttcaaaccccaaggcgtcgatgataaagagtaagttttcgaccgagttgcgagcttcaaggaactcgcggaacatccgacacagtgcaggagttgatagaatgtggtgcaaatgagctcgtcgatctccattcgtgacgccaccacctgcgactcgtttggcaagctgagctaaaacgttgcgcatggactcgctcttcgtcgcatgcgagtaacccaacggcccaggttctcgtacgtattcgtcgaagttcgccgtgaccacgtccagaacgtccagaagcagcattttgaacatcaacagagctcgctctgcgttccgatctgcaagatactgagccaatgcttcccgctctgacggagaaaccataggcagcaagcgcatagcccccttggcggcgtacacgtcgtacagatcatccataagtcccatctggaaggaagaaactcctccagcagcggtcgagctcgggattttaagcaggtcgctgatctccagccaaaacaacgcgcagtcttctcggtagtccacagttttggcccccgttcgcttattccggaacaacttcccctcttcttcagccagcacttcagcttgtgcttgtgcttgactagctgcttcgtcgtcagcgtcgtcctttttggcaagtttctccatgtgcgctgcagcgcgcaggtatttgaagtagccggtcctcgcgcgttcatcgcgtagtagaatatcgagtccaatggttacgggcttgtgcttcttccttgtgggccgtcgtccttgttgctccgatgttagacggttttcactgccagtgtagtgcaacgaaggcttgacggacatatgccttgagcggactggcgacggcgctggcaaagccaaggctttaatggttccggacggaggagttaacgcgtctcgcttgattggactcgtgttgcctcccgttggtagcgccgctgttgagaaggatcgctccagtcgtcgaggcgaggacagggggcgagtccccctgtcgtgggcatttttactggactcgcgatgcgatacggtgacggcactcctggagtttatcctcagcatggactcggggctattgggatctggcgccaccaggttcttcgacggcaccgctgacgtggttggactcgcctttggcgcgacgcagacgtcgttgcctttcggcgccaggcctgggatcttactgaggcatacgcccatagccctcgcgactgtggtctcttgtacagtcagtcagtcaataaaaaaccctgcaagcacctcgacgtcactgtctcctcatcaagtgtgctgcgaaccaaccaagtccccaattccttggcggagaagctttcagccttcgccacgcgagtagagggagacaccgagatgtgaaggccaaatgcgtcgccggtcgactcgtgctcaggactctggaaacttctccaccggcctggaatagcgagcagctcgaaatagtgctcgcccatggaagcccagcacgctcagtgtcgaggctctgcggagctgattttagcttttgtcttggttgacctgcctcagacgcaccaagatggaggcacccagcgccccagaaggcgagtgaatggggctgtaatagcgctggacgctgcgttcacagcgaaaaaccttgatcattgcgtgctaaccacacactgcgcgcgataattgtgtggcgtgggactaggattcaaaaggtccccggcagaaaccagcaaaagcaatgcttcggagctacaatcgaggccctcggagcgtgccaggaaccacgtgggtaggtaagtaggtaggtaggtgccttgcacaagtttggctagtaaaggtttactgtaaatcctcgtttctccatgaaattaacagcatggtaaaacgctttcaagaaagttgtgaagattggctcccacgcaacatataggaggtagttgtatacaacttggctctgaaaacgattctctcatgccattcatccacgacatcgacaaatactccaacaatgccgtagaaatagcaatgagcacgcacgcagggaggctgctaaggcaacataagtcaactatattgattccaagcaggttgaacctcaaatccgtgtactatactgcaggatattgcagccatgatcgaccgacgcaccgtgttcctgcagacgtctaacgtttaggattgggtacaagagtgtcgccgtagacggatttgatgcagcggcagtttgatgcagttgaagttggggcggctgagccaatcacgacgctcgcaagcacgttctgcttggtgtgcgccacgtgcttgcacttgtcctcggtttaacgtctgcaccccttcaagctcagctcagctcactcttcaatctgccaccaactaactccaccaccagcaccagcaccagcaatgctgagcaacgtcctgatcaagacgcagcgccgcgtggccaagcgcgtggcggccaacgcggcgcgtcgatggggcagcggcgtggccagcgccagcccgtccgccgatgtgctgcacggctcccccatgccgctgaccgtgctgaccgaggaggaggcgatgttcaaggactcggtggcgcgcttcgccgccgatgtgatccagccgagcgtgcgcgccatggacgaggccggccagatgacgcccgaggtcatccagggtctctttgacaacggggtacgctgtcaatcgtcaaccactgggactgtaggagagagcatcaactaacctgactatcaattgactgcagctgctgtcggtggagatcccgatggagtacgggggcgtgggcgcgtccttcatgagcctcatcctgaccatcgaggagctctcgcgcgtggacgcgagcgtggggctgctgtgcgacctgcagaacacggtcgtgagcaacgtgttcctgcgctacgccacggaggagcagcgccaggagtacctgccgcgcctgtgcgcggacacggtgggcagcttctgcctcacggaagcggaggccggcagcgacgccttctcgctcaagacccgcgccgacgtgtcggcggacggcagctactacacgctcaacggcgagaagatgtggatctccaacgtcgcgcacgccgacgtgttcctggtcatggccaatgtggacccgtcgcagggctacaagggcatcacctgcttcatcgtggagcgcggcacgcccggactgtcgttcggccccccggagaagaagctcggcctcaacgcgtcgtccacgtgctccgtcatcctcgaggacgtcaagatccccaaggagaaggtgctgggcaaggtcggccagggctacgccatcgccatcggccagctgaacgagggacgcattggcattgccgcgcagcagctcggaatcgccgaaggagcgtaccgccacgccatgccctacctctttgagcggaaacagttcggccgcgctattggggacttccaggccatgcagcaccagtacgcggagctggccgtggagctcgcgagcgcgcgactgctggtatacaacgctgcgcgactaaaggacgcgggtctggactacatcaaggcctcctgcatggcaaagctgcacgcgtcgcgcgtggcggagcggacgtcctcgcggtgcatcgagatgctgggcggtgtgggcttctcgaaacagctcatggccgagaagttctaccgagactgcaaggtgggcaccatctacggcggcaccagcaacgttcagctcagcacgattgcgaggttgatcaagcaggagctggtgtgatgtgagcttcagtttgtttgaggaagaaggaagccacgcgaacggaagcggctctgtgtatgtgaactaactaatccagtgtcaacttgccccacctagttaaagcagaatgcaaggtgcaagagggaggattaaaaccacgtagaaaagggattacttgcgagtgtatcattcattcggattaccagcacgtagcgttttatacagagattacctgcgcgtagggctcatctgggagcttggtgcccctctctgttactataacaatgccttcgctggcccctacggctaagcaaaaataaaacggatgaagtggtgagagcagttttgagcctctccaatggctccctgaccttacatgtaaaacctttgccaatcgcgacctccagggtttagctattggctagccgagtggctctgcgacccatgcggtggcattatagaggtgacgtacgatcgatgcgggagtagcgttagattcatgtgcatctcaggtcgtacctgttgtgtgtgtcactcatcacatcggcagtcacaattgaacagttcattaccaaaccgaagctgacggaagctgcaccgttggtgacagtcatcatggtacattaagctacatcagctctcgcttcaccctgcctaataacagcgtccaaagtgcatgttgtaccaaagtagttctctaagcggatagcttagagccagcgtcatttcttgtcagaccagtttaatacattcggtacattttaatatgaactagagtatccaaaatctcatggtattaccggtataaagcagcgcagcgtcgatttggaataaaacttaagcaaaacaaaatgtgcggtttaattcacacccaccattacaatgcatactgtggtactgtgcgacgttggggctcatgcaggctgcggaatccaaaacggagtgcgcatggcgcgacagtagtgtatgcagtgtccggacgtcgtaccacagtagtatgcgtagtgttttctggacgtcgcatcatattgagtaccagtatctacattgatatagacggacaagtccatggtggtgcactttagagtgctcgattagatgggcgtgatgtttgctgcagcaagaacctaagtaaagcaatatgaacgcatggcgcagcgaaattagcgccaatttgcaccggacatcctgtcggacagatttgaaattttgtaggccgggggctctctatccatatgctgcgccgaggtgaagacgtcctctatccacgtccaactagaagttatagagtcgtaggccgaataatcatccttttgctactgccgtcttcatttcattgtcaaaatttttgtgcgtggtggtaagggacctctatttgtccgtcaacgtgagctttgaatggtacacgtcgtatgctggcgacgtttgtgtaagtatgttgaatatttgtgtacgtatggtgtggcaaaatgttgtttaaatgttgcctgaggtacaagcacctttttttcgacgaattaatctgtgtgaggctgtccatacagctcttctagctgtcctcccaggataatcctatttggtctgcgatagcagcactaacgttgcttcttatcccagtaaaatccggattctgatccgggttcattccgaatgtggtttggggcatttctttgtacacattctgattttatccaatcatgatcactcaaaagatgtgtatcattaataaccccgtgatagccgattgctgatttattcgtatatagcaggagactgtataatgtaataaatcaaacaatccgaatacattcgaatataaccggatttattcgattttcaaaccggtcgaaccggatgagcatgagccagaaatgccaatccggaatccgaatgtcatccgattaaattctctcagcaggcaagttgcctgctgatacatacaagtatgctacctgccttgctcagtcctgagccgcaactacgtgacaaaaggtaccagtatccagaggcacccaagctcctcatatgagccaggagatattcctctatctcgactgagcatgcaagcaattttgaagatcccaacgactgtggctgccgttttttctggacgggtggcccacaaacatgcagaagcgttccggtaactcaagcttggatcgctatcgaaaaccgacgactcaaacgtaagtacatgtagtagcaccctcactattaaccgaaagtatctaccgttacagtgtagtttatgaatcaccgcggtccctcgctgggaagcactgtatggtgcagtgcagcagcacccttttgcgcttttcctgagctccgcgctgactcacaatctcatttgccgtttccagtcgagtccgacccggaagacaactacccccgctcttactgacccggccgtcatggctgcagctgcgcccccgttgctccacgtgcgccgacaaatcagcgtcgcgctctacggcgaggttctcgagtgcgagctgcccggcgacgacgaatcggtagcagtcaagtgcatctcgctcacgcgagcggctgaagcacgacgccaactgcgcaccacgcgggagatcgacaacccgatgcaagagcaacgcgtggctgagctcattatggccaacggaggccaccgcaacgtggtgcagccgctcttccacttcacgcacgacaggagactatacctcgtcaacgagctgtgccggggaggagacctgcactcactcgtggcggcaaggatgagcgtatcgtccctcctggaagaacatgaggtgctgccgttgatgcgccaagtgctggaacgcgtcaactacctgcattcggcgctcggcgtcgcgcatcgagacctgtcgctcgagaacgtgctgctgagtcgcggggtctgcaagatcacggacttcgggttgtcgacgaacgctcgatcgatgtgcgaggctggccaagtgggcaaggagtactacatggcgccggagatcgtggcgggggagcggtacgaccccgccctggccgacgtgcggtcgttggggatcatgtggttcatcatgctcacgggatcgccgctgctgtcgctagcgtccccatccgagaaggcgtttggggcggtggccaagcacggcgtcggcgctgtgatcaaagtgtggggccacgcagaccgcatatagacgagcacgacctcgttgctggagaagatgctgcagatcgacccgactcgccgcgttcggttggatcaagtgctggcccaccccttgttcgcccccgcgatggcaacgcagtaaggtgaggaaggttataccaaggttacgtggcctgtatagacggatacacagccctcggtggggagaacctagttcgtacctaaacccgtcgtattcctaatggattttcctaaaagtatgatgtgcaccacacaacgtttaggactgtggtaggacaagaaacccaaaaattttaggattaggacaaatccacgaacatgacaaaaacaccgcctatccaaaatgcagatcctattgttatctttctcctaatcatgcaaaaaacaaaaacacaaccgcagtggctcatcgtcgactactcatccagctcttcaagagggtaatcagctggaatcctcgggtcggcaccaacaaggtgcgacggtggatcatgaatgttcttgcgaatttggtccagcatctcgcgtacacgcaccgcttccatcttggtcacacgtatggatttgggaacccgttttcgaagcagcccttgtagagattgttgtacgactctaccgggttgttggtgcgatcgcggatgtcggcgtttgtcagaatcatctcactgacgttccacagctcgggccataatttttcatccaagtctgggagaagtatgaccaaaatgtgttccacgccttcttgtgacccctttcgtcgatcttggagcgcacatacgggatcccgtggctgacaatctcgtcaacgggaatcaccgtcaaaatgtccatgatacctgggctcatcgccgtgcatatggcctcctttgggatgcgaaggtcgaccaacttgcgtcgaattgcctgcttccagtgaaacaggcatcccacgagcaccgacatcggaaacgcacccgttaccgcgttgatcagcgccttttcaaagtcacaagtcacggtccgcggcttcacttgaaagttgacggctgcttggagccagtatagcaggtacttggaggtcttctcgcattttgcagtcgccaaaacgtaaaccaccggaacatacacatccaaagatgcatcgtacgccatcacgatgacgatctgcttgaatggacggggcataccttgaaggtcccgtcaatgtagagagccagaccaggctgtcgaaggatggggatcaaccaggatgggcaaagccacaaatgcgctgtagagcattcttggagacaaatgtcgagttgaatagcaggaagaagcgctcgtccatctccgacaggaagcagtgtggctcagtttcaatcgtgcgaaagaaatcgcctccgttcacgaccgcgcgaacgtgctccacgtgcttgatgccctgctgacggctcagcaccttaaacggacgatcaagatacttctctttgagatccgcatacacggaatcccacactcttcctagaacacagcccaaatcttcttggctttgactctctagcattgccttcatctcgtctcgcgcgtcgattgctggcttggccgggggggcggcaggtatgatcattcttgaccacaactggggatcccgttttcacgatgagtctagctggacacccattggtgcgctgagcacaggacagatactcggtttgaagtccagcgcggttgaccacttttcgcttgagatggaactgttatccttggtagttcattttggagaatgaaagtgattctgacctgaggaagttctcttcattttatttgttgaagttttgggttcaagcaggtggttcaagcaggtggtaggtgacaatgcgaaactctgaatatatcaaaattatcaacgcgattgtcgcatttactatcccgttgtaccagaagaaaataaaatatgttttataggtttacacaatataatagcgttgatataaaacattgtgctgcgctgttgagcaaacaaatccgtatggctttggggcacaatccaatattttcatgttacattttctcagctgtctgttcttatagcatacattttattgcatacacgtggtattttctcactgtcaccaacgtgacacactttaggcttttaggactgaggacgctcagagacgtggctttcttaggacggattttaggcaaacgagattaggacagattattaggaatgagacgattttaggtacgcacagggggagttcccctcgcttatctccctgcaccgatccgtctatacaggccacgtaaccttggtatagccttcctcaccttactccgctgccatcgcgggggcgaacaaggggtgggccagcacttgatccaaccgaacgcggcgagtcgggtcaatctgcagcatcttctccagcaacgaggtcgtgctcgtcgacatgcggtgtgcgtggcgggaaccgataaattaggtcaaatggcatatttgatcacggctaaatgttgtgattaggtcacgtgaccaaaataccttggtcacgtacgtaatgaatgagatgtattacttgctgttatagcaaatgtcctctccatcctgcgcgctcagctccgtgttgtatgtgtctgagtctttctacgtgcgccgtcgtagtcgaatgagttatccggctcaatgtactcgatttcgtcaccgtcttccacgttctcgccatcggttgagggcacagcgctgctgtatagctctgagttcgcatcacaatttcacaatttcacgctcatcgtcgctgctggttggggactcgacgatatcactcagctctggcagcttcggttgtctttgtagcacgaaccctgcccgctcaggtggcttggctaagcctgagatgacagtcgttcgttgcgccacatactcgcgcgaaaagcgtggtcacaaacgttttcatgggcgggtgggcattgaatcgcttgtttagctcccgatgaaatcgctctaaaggattgttcgtccggctgatgatgtcgcgcctcatgtcgaacacattccagtactcgggcgggtatgtctccaaccaggtgcgctgaaagtagcgccaaaacgaccgccacttgctacgagagtataccggacctttagcctcacacacgcggcgtatcttggcctttacccaaccgattccttgcacagcaattttggtcggctcaatgacggtgagtatgtcaaagacattacgcgacatagcaaccttgacttcgttgcatggtagcccaatacgtttcatcttacgacggcatgcctgtttaaaatgaaaccggcatccgataatggtgttgtcggggaagaactctcgaagtgccccaatgagagagctctcaaagtcacacaccacgcctttcggaaccagcttgctccccaccgcatcttgtacacactgtagtagtcggaggtagaacttcgtcgtcatagatgtagttgccgcatgcaggactggtagaaagagtttgcttgaaacatcatagatcataatcgtgacacactgcttgtagtcgacaggggcacatcgatacgtgccatcgataaaccacgacaaattttcgaagcacagcaaatttaaaagcgtaggatgagcccacgcagttatctgatcgacgccattcgcatcctttggcggcttcttcagcgccttgacgtcatcgtgccaggcaaactgaaacgggaagaagccttggcgcgatcctttaatcttgatcagcccggggttcgtcatgatgctggctcggccgcgactggagtcctgaccccgagcagcttgaactcggtttttgacgttcttttcggaaacgcctcgaactggggctccaactttcatgtagaacttcttcacaatagccatccatatttgcttctgagtgagattcgtttgagtagcgagtttgtcgacctcctccatgatgtcgctcgaagcgtcgatgaagtggtcacctgggttccccgtggttcccctgagagcaggaccaccacggcatgtatgtgcttccatgccgctgaagtcgaacatcatggtactcgcacagaatacaaaccgcgcggggcagggggaacaatacgagctgcagcgatatgatatcttgtttgacgttgtgttggctcgcgcaaaggagtacccctgatagtacagctttgcacgtccatcccgaggctgggacgcttgttgcgaacgtcacaaacaggttgcggtctgggtgtccccatcggataatggtgttgatagaactgggcgtagctgtggggtgcctgccagcgcagacacgtcaggttccgtatcgcacgtgcccaaaagacggccgtgggtagtcaccacggcttcggacacctcgctctcaagaacgtcactcgctgcgcggttggttcgacgagtcggacgtgatgtcggcgctgcagctcccgcccgtaggtcttgaaaagtcgcgatagcttcggacacctcacgctcaagtacgtcacttgttgctcgattgcttcgtcgagtcggatgcgaagtaggcgcaaatcgagattggccacgtcggccaggagaacgagatggggcatggtctggacaagatgtgaaggcccctcgacgaccgccttggcgccgagccatgctgtgttcattagcggtgggcgacgacgtgaaggctgcttgtgaagggagaagtcgcactggcccacaggtcgcatgctttattttgtggcatgttggtttcaaaacccccagttaagaacaggcacatgagtctggaatagctactagacatgttgtactttaccgcggtagtgagcaggataacttggacgatgctggggagctacaagcttgtgcgcgtgacctagcgatttaggtcacgtgacctaagtgccgtatgtgtgacctatccgtggcctatcttcaagatttggccttgaccaagtttgccatttgacctaatctattcgctgccgtgcgtggccccacactttgatcacagcgccgacgccgtgcttggccaccgccccaaacgccttctcggatggggacgccagcgacagcagcggcgatcccgtgagcatgatgaaccacatgatccccaacgaccgcacgtcggccagggcggggtcgtaccgctcccccgccacgatctccggcgccatgtagtactccttgcccacttggccagcctcgcacatcgatcgagcgttcgtcgacaacccgaagtccgtgatcttgcaggccccgcgactcagcagcacgttctcgagcgacaggtcccgatgcgcgacgccgagcgccgaatgcaggtagttgacgcgttccagcacttggcgcatcaacggcagcacctcatgttcttccaggagggacgatacgctcatccttgccgccacgagtgagtgcaggtctcctccccggcacagctcgttgacgaggtatagtctcctgtcgtgcgtgaagtggaagagcggctgcaccacgttgcggtggcctccgttggccataatgagctcagccacgcgttgttcttgcatcgggttgtagatctcccgcgtggtgcgcagttggcgtcgtgcttcagccgctcgcgtgagcgagatgcacttgactgctaccgattcgtcgtcgccgggcagctcgcactcgagaacctcgccgtagagcgcgacgctgatttgtcggcgcacgtggagcaacgggggcgcagctgcagccatgacggccgggtcagtaagagcgggggtagttgtcttccgggtcggactcgactggaaacggcaaatgagattgtgagtcagcgcggagctcaggaaaagcgcaaaagggtgctgctgcactgcaccatacagtgcttcccagcagggaccgcgggcggtgattcataaactacactgtaacggtagatactttcggttaatagtgagggtgctactacatgtacttacgtttgagccgtcggtattcgatagcgatccaagcttgagttaccggaacgcttctgcatgtttgtgggtctcccgcacagcagtcgaagtagtagtgatttccacaatgctgctgagctcagtcggtggataagtcaggagggaaatctacttgctcatgcggatctcttaccagactacgatactggcaccttttgtcatgtagttgtgcgctggaagctcggagccgagcacgtgcttgtatcatacaagccctacgtatcagtaggacacagctgcgcagccgaccttgaaggccccccaatgcgagcagatacagcagggaagttcgcacagaaatttcctttagctatccaccttttgtcggatcccgctgaagcagcgattcggattgtgccaaggtcggcccggtattctttctgacgcatccagtctttttggagtcatcatggatgctaagccttagggtaaattaaagagtgatgtcggcgtgttgactctaattcccctcttgctggtgctgcggtgcggcggtgaagcggggacgtgcttgcaggcgtgatctttcgtgttctgacaaagacgagcaaaatccgcgtcagtaactgtgagatttcttcgagaaacaccccctcgcactgcatctgacccgaagggtgcatgtcttgtttgggtccgacccgacagaatgagggagggtcggaaacaccgaaaaatggacgtcagcaccgaaaactaggggtccgccatgtgccgagttggggtgcggaaacaccgaagacttggacaccaacaccgatgggttggtgtgccgagttacgcttggggaataactcggcactgtgccgagttgcactgcaactagaactcggcgaagtgctgaactgtaactacgtggtgttcttgtacgagctacgaagcctctaaatagagtttaaaatatacggtattattagacgggagctggaggtaactcggccacaaagcttacaaccgacctcgaagcatgcgcgttgcacgccgcgttttgggacttcgtgaaggctaaggggaccccctgtgcgaaggatccggctgacgctcacgctaacgacgaaaggctagcgtccaagtggcttctggaaaaatcgggtaaaaagcatcggacaagatggcaggcattgaaggaaagtgagcgaaacacctatatggaagctcgccgagaccccaccttccccctgcaagaggctcccgatggcattgtcgatgaacggaaggcgcggaaatcaagaccgataaccgtgagcactccacgtatggccgagttgtccgagccagacccagtcacgattgccgtactggataacactctcctgaatcagatacgtaagtacaaaaatgctagtatcgattacgtgcgtgctgttagcagggtggagataatgaaactagcgaaatcatgtcggacttccaattctacgaagcagaatttggaatctgtatcagctattatggattgcctcattgccgaagtaggctggagggtgcctgacagcgagcgtagcacgatgataagcatcatgagggatgcagccatggcaattgaagcatcatccactggacaagtcttgtggtcagacagcgagttagacgagatgatggattcgcttagggaagacgcaggctcagctcgccgttcacttaagagctatcttcagcacaagcggactaaaatttgcagatatctacgtagagagggaacgtcatccgtcggtaagcgggaggttcggtgagctcggatggatcgacaaagaagacgctgccacctacgttacacaggacgatgaagtcgtggtaggagcttctcgtgtcactgggaacgtcaccgatcaagcgcctcctatcgaaggtaagcgtagacgtacgcgcatgaatgactgaagctaggaggtatgctgtatctcgttactgagaaaaaaacatttataagtacacatctattggatttactttgaaatactctatatacgcctgtcattttgtatcttcatggcaacggtgtgtccgtagctaacagaacacagtcattcgacgtaaaagttgcaaacaatgcacgtatattcagtgtgataaatgtatcaatatagtctagtatcgagatgcctggctctgcctgacttaatcccttcctcccgacagagccatcgacgctagcgacatcgacgtttagacttgccttttgatccacgtcttggcgcctgcgcgttgtttgacacggaaatggtagcttgacctgacgccctccgttgttcaggcgtgtagctatcaagctgttccgcaaagaacgttggtactggcggcactcgaatatatagaagaacattttgatcgtttgcaatccgtccggctgtagttggtggtaacgttttcgttaagccagcgccgattgcaattcctgagttaaccatcggcaactcgccatagaggcgagcgcgctcacgaagatgctccatgcgcattccgtggcttcctgggcggggatgcaacagaggatacggtgcctcgtcatcaccagacatgttttcgaatccaaggcctgaaatatagtcaccctcgcgctcacggcgtcgacgatcacgtttgttggcttgccacctgcgatccacaaatcgtttgactggatcaggcataccagggcatggtaagccaagtagtttagccgccttgatgacatgcacacacatcccaaactttaagttgaatcggcattggcaatccttcgttgcggggtttactatccaaccagtagaaggcattccttcgtagagcattcgcaaagtgtacttcgacttgaatgggaaagagcgatcgaaatcgtgaaattcatcagtctgaccagtatttaaggctgcgtcgtcgctttcaccgtttgatgagctgttaacagagtcgtcactatactcggaatctccatcatcggcaacgaactggataacgtgagtttctgcatttttcggcttgcgttcgcccagccacggctttgagattacgtgtaccaaacgtaaattcccacaaggcaccgtggctatagccgaaatcgcgccacatttctccatccggttgaaacgtgcctcagggcgcgtggacactctgacgtcacggctgaaagctgagttttgggctttaaatgctagtcgtgatctatccagccgctcaactaactcaattggtgtcgcctgatccgtgttgtgaacccgtttgagagtcttgtgatattgctcagctggattattagttgtagcacatccggacggtgtacggaaaatctgccatttcgaaaagcaaggatgctcaatccactgcttgatcagaggctgagctacagcgcgaaacatgggactgaaaccagaggcagctttccatgcagctagaatttggctcttcttcgtctcgtattcagtatctgaaatacaaaagtgcagttcgttaaagccgtgatagatcatgtcacgacttacacgcggcaaaccttgcgctttatccttcacgttctggcggacgtggaaccaacacatgagaatgaccgctgcaggcagttccgcaacacatgaaccaaactgagcatcgtctttatcggtcatcacgtatcgtggagcgaaattttgtgcgaattgctctagcagcactcgcttcacaaacttcaaacaccagataatagcttcagttcgccgctgggacgaacagtaatataccaccgtaaaatactttccgtagcagtcaggcacgccaagaacgaaaaccgagtatcgtttgttcacagtaatgtgtgtgctatcaacgtggagcagtgtagggcacactccatcttgctgaaccgacacgtacgtctgtaacaaggcgtagcaggttataccaagcctcattggctcggtatcagagctttctcctataagaggtactcgctcgccttcttttatctcgtagtcacagagaaccaacaagccgtcaggtactggtctgaatcgtacatggctttcttgcagaactcaatgacagttcggatagagtcattgtgattcttcgagcgccaacgtagtttttgacttggtcctgctcgggtgaaggtcctcgaaaatcaccggcctttaactttgccacagatgagagaaaataggacgtatggaagcacggctgagtcctctgctaacttggctccaatataagatttcatttcggctgtgagaataggggcccttggagatgcgagaaccgagttatccatggtgtgagcaccctcgacaaaaacgactgccgcatagttcaccacacaacataggattttgtagcggcagcagcacttggctagactatccttgcatcgtgacgagttacattccgtcacaatacaccgcatgtcatgaggcaaggcaacaagatcggtctctccacgggcagcatgaccaactctacagttcgtaagattgtttttctttttggcgaaacttggcatagtgaacatgaacttttcccacgcgtctcgttggatttctgtatttgggggggggggggtagtccaaatcatcgtctaaggaggacgtcgacttctactcgcgtcaccctaaagaaacaaagtcacacagattgatggttagtagcagaacatttcagataaacaatagcttggacagtgaatacctggtcgcctagccgttacccgccaccctgccgctcttcgtcggcttgtagccccccgtcaccttgccgttccacctcgtcatgccgagcgtcatcgccttgccgtacactacgacggcgtgccatccgcacctccacacgaacgttgatctacaccgttgcagcaaagtacagaatgatacagactggatagcccgtgatatttttatcgggaggcacacgaatcccaagattaggactcggcacttcgccgagttctagttgcagtgcaactcggcactccgccgatttcagattctatgtgtaactcggcacagtgccgagttattcctcaagcgtaacccggcacaccaaccctcggtgttggcgtccaagtcttcggtgtttccgcaccccaactcggcacatggcggacccctagttttcggtgctgacgtccattttttcggtgtttccgactctcactcccgacagaatgcagcagtagtacaggcacttgagatcacatgaatgcacctttttttcttgaagactgtattgtcacttagttactagtagcttactactcctgtctaccaccaactaacgacaaataacctggccccgctcgtgctagaaacgtcacgtgcagggtgaccctccgattgcggaaaatccgatgaaaatccaaagcgcgacctcagagagggcaggagatcaatctcgccagtggcgagtcgccacccacgaggttcggcaggcacagggcacgggtcctgcatctacctgaatgcggccgtagtagccgctgtcccactgggacttgacttgagcgtaaccatgaatgcacttacatagagagaccatccgcttcagtcctactacaatcaagtaatgtttggaacatagatgatctacagtggatttggcgttcgctgagggggagtcagacgtgcgtctagctaatcgcctcaggcagcctgaggctgagtccggcttggcccgagtcaattggatagtgtttcattctacctgggttgagtgatcgtacaaaaccagtacatatgcaactgtttcactctagagccttccatttaccgccccagccgattcatgagaatgaggcatttcaggcaagcgacttggagctgattcttccgggagatccaatagattgagctataaagctgcatctccgtcttagcgggtgtagcacagctagcagcgaagacagacgagtaaaatattttggcgaagacaatatccctaaacgctacgatcgaccataaaaatgccacacccgttccacgcatgatgcagagcagccgcctcttgtgctttctcaggcttacctaagagacaactacattaccggccatttgcaacccaagttgtatttctagaaatcaccacctctgcttggccagctgcacggtatcgaccaggattgttgcttgtactgcagccaaatggtacagtatcgtttgcaacttcggttgcgcacacggtagcaaatattagtctgttttgcaactcaactcccatacaaactgcaagtcacggtagcaaaacgacgccgtatgggagagagtatacaaaacacaagtgacttcgtttatgcagggttgcaaagcgtttatcaccgtggcaagccgtgacaccgcctacggcggcctgaagctttccatggctggtcgaaccagctcatactgtcgtacctgcacgtagtaggagggcacgtcggagccgaaggcctgttatggcggggctaccggtagagctagcacctcacccttctgctgctgctgctgctgcacaacccgtaggatttcatgcaggcttcctctaccacttcctcatctacggctaattggtaggatcagaggcgtactctatccagctctcattgtagacgagagaacgcagaaggtaaactgtgttatcatttcagatatcttctcacaaatcaaagtcagcccgccatacctaccgcgcagtagcaacctgcgtgaaatggaagccatcccggggctatagtcttataaaatcggcttggaccgcccccgcagcagtatcgcctgcacacgtgagctgttgccgctctgtcgaaggaagttaaagcgtttaaggagtacaaggccgtggccagttctcgcggtcggcactacacctacgagagcgactacagtgcattacaaagaggttctcgcagtcagtactacacgcacaagggttattcagctcatttcacagcgcgttgctcataaagcaacctcaaagtactttaatgcggtagcaaagtgacacattacctgctcctccatttttaaccaatgagatgacggttgcaaagctgtggctggcatttctacagtactgtgcctcaataaaagaccccaattatatacaattttcaagataaatacgaaatcaaaggatttgtacgagtgcatcacaatacaaaatcagtaccatcccgagattgcgatagcggttattgtgctttgcagttattttgccgaccattttagacgctaaatatggcacagcctgctcctaaataggtgtgaaagaagatacacgacctgctaaaattatgcataaatccacctcctcatatatatatcgacttgggagggcctgtcagcagccatgcatgggcccagtacaccaccgtccatgatccccagcacatccaccctctcatgcataattgccgtgtgtgtaggtgcttgtggataaaaaccgacagaattgcaagtgcacagccacaattgcactttcaaaagtgcaattgtggcgcttttagtaattctaggcctccacccatttatgcacctcgatttatcgtaaatctagcaggtggtcgctataaatacagcaaatctcgcctcatattgccaaaatcattgcaaagcacaatataagttttgcgatattctttattgaagcgcaccactgtatgtacctcactgctacagtatcgatcctatcgtcgcggctgcaactgcgcctcgttacttcacgtgcgccgacaaatcagcacagcgctctatggtgaggtggtcgagtgcgaactgcccggcgacaacgagcagatagcaatcacgtgcttctcactcgcgcgagcggctgaagcacaacatcaattgcgcaccaagagtaaagtcgagaatccgatgcaagagcagggagtggccaagctcatcatgacgaacgaggccaccgcaacttggtgcagccgacagctaagtgaaagagcggctggcagagcggctggcagccgctctttcacttccaacacgacaaaatctactgcggaaaatctgaccaatagactattaactacattctttttagtacaacaatgttcgttatcgctctcatatttacgatttttcaaaatggtttacaatattaatattgttttttaaacttttcattggaatccctactctaggagcgacccaaagcgccaatttggttagttatccccgcaccgatgcggagagtacgactcgctctgtaagaggtacctgtcccccgatatgatcctgattttcgtcccatcttgctattacgctttttaaagaggtcacaattctgctagaaatatgtattgtgctttgcaggtcggattagcatcctcatggtacttttagaaagtgccatttctgagccaaatcggaatgggaacacgattcgagcaactcccattcacagcctctatgatttaccgctaagtacgagcactgattagtgcactaaataggagatgcaaagcacaataaaataaataatagttaaacgagatattaacaatattgataattatatttaaaacatacatattaattatgttatatttattttctactattttaacaatttaattgatgtttttaaaataaatatctttaaacgctaattaaattgtcgattaaaatacggaatatgttgcaaatacctttacgaaaatgtatttttgatgcctggaggctctacaactgctcaaggcctagcaacgagtcttgtcaagaaatgcggctgagtagcggagtaagtagaatcacagacaccgggtcgtccgcgagcacctgcgacactggccactacaaaaagataagtacataaggaatcgcttcgtaactagagaacgcagctcccacagattctttagcttttcattttatgacaaagtgccgcttacacaccccaccctatcctggaaattttattagggaacccgggccatgaggcccggagattcgcagttctcattgaccgatgattagaatcaacgaaaagaagaaaacaggtattgtcgttcatggaaggaggaggctttcaccgagcaagcgttcgtctctgtatctcagggttaaaaaatgaatttggatgttgccacgaagaaaatcaaaaacaacaaaacgggaagcagtcgcgcactcgtacgtctgcaaagctccagagtggagctaaacgttggctagcgtaaagttgtgtctcggggacaggggtcataccgtctttactgacttgatcaactccagaacaagtagccgcgtgaacctgaaagatttaagcatggtgtaggagcacttgctcccggggagtactcaggtcagcgacaattacgaggtgaattcgaataactggcaaaatgcgaagttcgcaaatctcaaatttcactatgcgttttttttacttttcgctcagcacccaaactctcaaattgagaaaccactcagaatctcaatgacatttttgcgggccactggaccagacaacaacaacattataataataaaagatctagattaactgggctttacagtgtacaagtattttattttgaacatctcgcatgctttgcgtgccgtctggttggctgatactgtatttaatgtcttagccatgagttggacagtagtgcattgagttgccttttattttattattactactcagctacttctgaacacaggcgctataaaaaagctacttagcatcaaaatattaatgaacggacttcaaaacctattgcgattggaggattgtaggaatgtaattcaagaacgtacttagtatggcatgaaaacatctatattctcaactcgggccgcttcgatgaaatttgcatgatccccagatcgactgtcacgaaccattttggcgttaaggcgagtttcctcatcaaataacaccttcaccagtgcctaaactcgtttgcagctctttacaagggcgaaaatttcgtgtgagccgaatcggcaactactagaacggagcttctttgcacgatggcatatacctccattcgaagacggttccaccacatcgccgggctccaggactcaatctatagaatacagacagtgatcagcagactatgttctgttgcaatgttgccagcaaagttgcaggatgtcaatgcgtcaaacatggctacctcaagcaacttaaaatcgccagccgtaatgttgcaggatgtcaatgctgcaaacttttctggggctgcctaacgcagttcttcgaactgcgaactattgtccctttatttcgctgctatcgcgggggcaaacaaggggtgggccagcacttgatccaaccgaaagcggcgactcgggtcgatctgcagcatcttctccagcaacgaggtcgtgctcgtcgatatgcggtgtgcgtggccccacacttcgatcacagtgccgacgccgtgcttggccaccgccccgaacgccttctcggatggggacgccagcgacagcagcggcgatcccgtcagcatgatgaaccacatgatccccaacgaccacacgtcggccagagcgggatcataccgctcgcccgcgacgatctccggcgccatgtagtactccttgcccacttggccagcctcgcacatcgatcgagctttcgtcgacaacccgaagtccgtgattttgcagaccccgcggctcagcagcacgttctcgagcgacaggtctcgatgcgcgacaccgagcgccgaatgcaggtagttgacgccttcaagcacttggtgcatcaacggcagcacctcctgctcttccaaaaacgtggatgcgctgattcgagctgccacgagcgagtgcaggtctcctccccggcacagctcgttgacgaggtatagtctcctgtcgtgcgtgaagtggaagagcggctgcaccacgttgcggtggcctccgttggccataatgagctcagccacgcgttgttcttgcatcgggttgtcgatctcccgcgtggtgcgcagttggcgtcgtgcttcagccgctcgcgtgagcgagatgcacttgactgctaccggttcgtcgtcgccgggtagttcgcactcgagcacctcgccgtagagcgcgacgctgatttgtcggcgcacgtggagcagcggggggggggcagtggcggccatggcgtgcgttgtaacagcggggtgttgtccaagtcggacttgagcagataacggtgagagggattgtggggaggcagcggcctgcaaccgcaggacaggcgctgcaccactggtgaatggcttttatggtcggatcggctcccgcaaaagatacttttttttccttgacggctcgggattggctgaaaagcctaatgttcgaaatggaagatttctgaagctgcgggatgaaacagcgttcgcgtgttctaggtacagcccacggctcgagcgaaacaaggcgcgcactcacgctgactacatgtaatcccgcgctgccttgccttgcctcgtggcctccagattcaccgctgaaagccaccaattctggagcgctctgggccccagagtggcgggccaccacactggcggcaacgtgtagaatactacttcagtagctatagactatagactatagtggaggaggtcgccccttcgtaccgttgaagtgcgttgcgatcttcctgcaagtgacagtgctctctcagcaactggcgctgcccgtgcaaggcgccttcttgccgccttctactctacgtggccctcttgcgctttgcgagcgaatcgcgaatcgacctgtgaggttgcaagtcagctaacagtcctagaagcacacgggcattctcggcggcgcatcagtcgttcgtgtatccccaatgtacccacaacatgtaccaccagccacctgatacgtagcacgcccaaggatggcctctggcagaagacctcaaagccctgcaacgctctgaagccgtgattgcaatcgcagcttggggcaatccattgcccagcggcaatttaccctatagcagcatcctttccatcactaggcgagtccgctaagccgactcagggccacccgtcctcggccgcgcagtctgtcaagtgagcgagcgaatgatttaaccttatctgttagcacatgaaagattgaatgtcgaggagagagaagcttcaatcgcaaggttcatttgtcggtttaaatacgtgtgcctgctttcgacacctgagcccggtccgcgcgttcaatccgcagcgcaccagcaagacagctctcattaatagtacgggtggtagcccgcgcgcgggccttcggagagcgggatgtggttcacgttcacgggcaccctcatggctggggcaacgtcgacgcgtccccgcttgtggagcggctcttcgtcactggcgaagttgcttctcgtccgagttctggacgccgtcgtggcgaactgaggcgttggaggcatcacggggggcgcggcagtccacgccatgccggtctgggccaccgttccccagccaacctcgtttaccatcattccaccagaccgcttgggcgaagtgagcccttcgaagagggcctggctgtcctgtcgagcgctcgtgcgcggggtcggctgctgcgttatcggatcgtcatcctccagcaacagtctcagcagctcctgcatcatggcgagttcctcggcgttaaacccggcaaagagttccattgatttcgatagttgcttctcgtcctcggttcgaacagcaggaagttggaatggcagcacggagctcaagccgagaggatgaatgatcgaccgagccaagccaagccagaccccatcctcgagagtcttgcaaagagacgatcacggccatccggtgacttcgaccttcatcaggacaggtggcagcgtccaaatcgccgagatcatgcatttcgtcttgcagaggggggaattcgaggctcaaatcgcctcgagacctcacaacgccgcggctggcgacttatccagcttgacaatcgtcttgtcgagcacgaaacaagcgaggctatgcccccttcagtcactgtactgcatccccctatcattcaacccggtcaggccgtctatatttacagcagcatgacaccacagcagcctccatctccatctttgatgccggctctgcttggggttcgccgcatttagccacctatctgtacggtttattgtgtcacctcccaacaatccgatcaccgatgtttgcgtgtgtttgagctttgctctgctccgttcctttcgtcggtgtgggtccatgacgacttcctcatcgcccgcggggctcgtaccgctacggcaactacgatggtcagcgctgccccctgttgatcttctacaggagtgccgctggctcgtcaacttggacagcaggacgagtgccaatcctgcccgaaagcctcgggttattgaagaacaagctcatcataagcacgagccgccgagcgagatgcacacgaacgagctgcaaaacctctgcaaacacaagtcgccgtaccgtcggccgctgcgccggccgaagccacccgcgccatcgcccggatcaccagcacagcgagcggcgaaaagtatcttgaagctgaaggaggggctgcttcgactggacggtacgacgtgggctgggccagactgtcaagacgaccaggcaactggcggcttaccaccgcgccagcttatacatacacagcaaaccgcacgcagaccaggtgatcagctgtcgactgagtcaaacctgaatggaacgactcgatccagaagttcaagtcccagcagagcgaggatactgcagcgaagtccgagtaggaagaagaagaaacagcgaccaccgactcgtgaagagcgcgagctcgctgagaagcaggggcgactggcagagtggctgaaagcgaaccccgatgcaacccccacgaatgtggttgaaggctcaggaagatcgatgaaagagtccaccccaagctactcgaccgaagttcaagctcgaatcgactcggcgatgcaatgccgaggtccactcgagtcgggagttaggctttgggacgaccctgtgcgctcgctactcgcagcagagatgacgagtgagtcggtgttcggcggaccagtccccacacgcgcgttagcattcgagccgcctcaggtcgaatctccttcctgctctcccgatgctggaactactgaggactcaccacaagcgccaccgctggaggaagcatctttgaccccggtggaacctactgcagcaatagatctggaggaccaaacaaaggtggaggaagttcatgacgatgtcgagatgtccgaccacgctcataaggttttcgacacggctcaccgtcaggttgccgacggagctgttgtagacgctcttgctaccctcgaagatggaattcgccaatcgctctcaatttcgcaggcgcatctggatgcggtgagcggttccaatggtgcagggttcaactactcggttcttgcacacaagagcgcggtcaagctacagctccattatcgcgctcgtcaccgtcgacgagtgaacaagttggtgtttctacagaggcaatggcgctggtggcatgctcgacacaaggcattgaaatcgcttcagtatgccaacaggcaggcggcggtcatccagcaacggtaccgaccatggcaagctcatatcacgcaggtgcgcagcgttgtgcgcatccagcgctgcttccgcatgtttgagagtcagaagcacgttattcgcttcagacaactctgccggcttatattagctcggcgagcccgccatcgacaggtgaaggcacgaatgcggatgctcggacgactggtactcttgctgcgtaagcgaaggcggagaatcgcgctaatacaaggtctatggcgtcgacgctgtgcccgtgctgagttagtcacaaggttggctcacgtcattgctacagaactgagtcgtcgtgcaagagaagacgagtttgttgcaacaaagttggccaaggtgcgcgtacatttgagagagtttctatctagcacgaaacccggacgcaatctcgtgcagtggcaacaagaaaaaccatggctgcgcttccggcgcctgcgtcacgacaccagcaaatgggacgagctatcaatggccgagaagattgacgctgcaactggaatactctccggccgcaggtttcgaggactggacctgcgtgcactctgccaaatgattgtggggagggaccaacagcttcatgcacttccaaagaggttcaaggtctcgaaagatagtctatgcgtactagcagagctcactgctgctccaggtgcaccgaaactgaaccagacggttggatgttgcgcttgctggtcgtggtgggcaagtgcaagtgaaaaattgaggtgtactcgtgcgaagctctctcgtagtgctgcaacttcgtggtgggcatgcatcacttacccgaaggagttctgtgctgctcggattcggcccatgcgggggcttcgacgggataaggcacgaaagcaaatggaggacaattgcgcgcgtgtgctggaagcattctgccgggtatggttccgccgtatcgacagtaagaggaatacacctccctatgcgtgtgagtggtgtgctgaagcattcggcacgtctcgcgagtatttcgcgcatgagaaatgtgctgcagctcgggcattagcagaagcagaatggacagcattgagccaggacctgcagttcgtgcgtcgcaagtggtggcgactggcgaagcagagccatggcagccccgttcgtcgtgacttttacgccttcgacctggaggcgccttcagtgcagcgccttagacgctcgcgcagtcgtcgtaaggggctaataccgcttgttgctgcattagaagcttgcacagcaagcgacagcccacactccgtggttccgctggacctggcgggattcctgctgcgatatctcgacgacaacgtcgacgactcgcacccgctgatgcacactgcagagcaccagcttgtgcgatggagcaccctcgtggggtcgatggaggtagagagctccaagccgacacccgacggatctggacgcgatagtcgctggattcgaagggacgagctgcgcgctcgactcattgtcggcagcaagtggaaaggcctcatgagccggtggcagcggagtcttggtcgatgcgcccagaagtaccgacgtctgccagccaggaatgccgtcgcgtttaagctgaagaccccgcgagctgctgctgaatccattgcatccaagtggaagacgctacagcgactgggtccgagccgcaagacgcgccggggatcaaagactccgttgtctccgtccgcagctgggactcgcgtgctgcccgctgcaacatgaccatcgagccattgttagggagatcgcgtttacctggggaaacagcagtagtccgactactagtcgtctcgttaaaactaccttgtgcaaccttgccacgtcaaattcgtaagcttttgagaacccaaaacgattctgaagtgccaggatccagcaacgaaagccgtcatgaatgcagtacagtatcagctgcctgctgtgaactcgcgacaagctcaactgctgctgtcgctcgagtgtgctgctgtagcagccctgcgacgcgccaaaagccctgtgctgcagctcgttagacttccagcattgcaagtcgcaggggctccgatatcctatgcttgactcaaactttgagcactcggacagttcagcgggctccggctcgcggacgagtggagcgcagcgaggctggccccaagcagcgttgtagacgagcccaggagcggaccatcagcgcaggcatcggcgtaaatgcaaggcggcaccctggcgaccatcgacacagcgaggacacttcaagccgggcggcaccagagctcgctgccacgagcgcgacgtcacggcggccagcgccgggcgcgaggcacaccgaggcgccctgcaaacctgccacgctttgctcgaagcgagctaaggcaacatcggtgctgggctgcgctgcgccgacagcgcccgaagtccttggcatgaacggcaactagcgcaacatgtaccacttcaactgcaatgaagggttgcgaccgttgatgcacgtccatggcgccggaaggcaggcaatccgcggcgacgcaagcgcgcgggtgggggtgatattatgagcaacagtttgtttccacaagggcggactgaaagcttggtgcacgttggcgtttgctcaggcagcgagcgagcgctaaaactatccgcacggggccattgcgcttgcattcttgtatggaactcaaaagtcgcacgcaaccgttaagaaaacctcagttagcctcagttacttgggttgccacagactatcaatgttcatagaaatatttaacttcgcgtttgtatacagataattttagagactattcgatgtcggttggtattgaaattcacggcctgcaggacgatcgccattatttattggcccctatatcgctgccgcagtaacgccagcgtggcgttcgagaactccgaaagcaggatagccgaggtccttccttaagtgggggaggatctccgactgcaacgtgcttgctgcagtgcattggtatggatagcgacgattcgctgtgggcgaattccgagcgctgccgccgctggtggatatcggcgcggatactcggtttttttccagcagtttgccgattgcgactcgcaaataccagttgatgagcctggccccaatttttatgtgacggagctgatgggtgagggcgtaccgtcggcaaagcaataaaaaagagtttgacttggccccactatggtccgcttcagccggacagcagtcccctccctctcgacgcggcaggttggctcaccggagcccacttcactttccgattcgctctccgagtccgaggtccactttcaggtgtcgccatgatccacgcgccgctcgccgtcgtggcgcccgccgccgccgcggcccccgcgtcgcccgccgccttctcggacgtgctggcgcgctacacgctggtcaagaagctgtccaccacgctgtacggcgagacggcgctgtaccgggacgaagcgctgggccggcgcctcgtggtgctcaagcgcgtgagcctgccgctgctgcagcagcagagccagagccccgccgaggtgcgcgagaaccccttgagcgagcgcctcgtggtgcagctgctggaggacccgctgacggcgcgcgcgcccggccgcgagcacgtggtcgagtacgcgcgcgagggcttcttctcgagcggcgacagcgccttcatcgccatggagttctgcgcgggcggcgacctgtacgactacgtgacggccaagcccggccgccgcgtggccgagggcgaggcgctcgcgctcttcgcgcagatggccaagggcctgagcttcctgcacgcgcacggcgtggcgcaccgcgacctgtcgctcgagaacgtgctgctcaaggacggccgcgtcaagctctgcgacttcgggctcagcgccgacgccaacaagctgtcgacggacgtggtgggcaagtactactacatggcgcccgagatcgcgcagggcgccatgtacgaccccaagcgggccgacgtctggtcgctcggcgtgctgctcttcatcctgctcacgggctcgccgctcttctccgacgagcagcgcagcgcgcccacgctacgcgtgctcaacaagtacggtgtggccaagatcctggagctctgggggctcaagaagctcgtctcgaggcccaccatcaacctgctgtcctgcatgctgcaggtgcagccgcagcaccgcctcagcgccgagcaagtggcgcgccacccggcactacgccgcagggcatcgctagtagcctaattagtgtctaaaaagctgtagagcaacctatctatctgtagttactgcgagaataataaagttaggtatttatccttatccccaagctacgtttctcgcctgccgagtctgtcgaagccactcggtgcagatttgcttcaacgtcgctcgcttgatggcagcgcgaccgcagctcggagaggaaaggagcgcgctaaaaaatgcataaactcacgtgtaccatcttcggacttcaacaccctctctatttgatctaactaactaataccgcgcctcggacacgttgctatcatctctgtacgacgtctcgttcacactgggcgcgccatctaagctgggctgcacggtcccgaagagttggtcggcgtacctcgtgggcgaggctgaagctgtcgaggtggacgaggtggccaggctcgccaactggttcgtcacgcgctggatgaaccgctgcgagctgctccccgtggggcctcgaggtcgcaccaatggcgcgaacgtgttggggttcctcaagggtcgagagctctcggacgttttcagccaccgcgcagtcaccgcgcgctgtatgggcttcggaggcgtctgcggaggcttggcgaccttgtcttcgtccttgtcggcctcttcgttcgcgttcgtgtcagccgctcgacccgctgtcgagtcgagatccgcgaagttcggcgctgaagtggagcgcgcgctcacgaatcgagatcgccgctgctgaatcgtggggaccgccttggagctcactcctcgcgtgatggacggccgacgggaggttggggcgtttgcggcggtggtgacaacgtccggagccaattgggctgtgacgatctgttgcggcggactgggagggtacagcgagtcttgaaccccgcgctgcagctcttggatcaacgccaaagcttgtgcctgcacgctctcgagcttcatgacttgcgactcgacttcgggctccgacttcaccggtcgagtgtagacgctgtccgagatcgcagtgcttgaaccattgcagtggcaggtgcatccacagtcgtgttgaccaccatcctctcgcgttcgctttcgattgatcggagcgctgctgacacggttgagtctgggtgatccgactggggacgcgggggctccggcggtccaagtaccggatctagccgccacttgacgcggggtttcttcctctgaatgcgtcggaacgccaaactcctggtctcgaacgactacgagctggtcctttagctttgcactcagcgcgaacttgatcgagtcatcctcgacgtccggattcaccgcccacgcgatgagtttagcagcgcgtcgaggcgtgatgaacttgtcgccgtttccggctccgtccacctcgccagcaaatacagagcgaaccatggcggtgagagggcaaggaatcccgaatcgctcgttgttttccagggacgagatcaaaatctgcgaaatgacgtgctttcggtctgccgggtacctggtcaacacggcctggaaggcagtgcgactgagcacgcacatctcgacgtacgtcatggcgcgtacgttggcggtgcgctggtagttcatgagtaacgccatctcgccgaacgcctgtccgcgcgtcaacgccttgacggacgcattcatctgggtaaacccatcggggctcacgtgagcatatcgagccgcggcgcgggcactacggccgtggtggtggacaccgtgacctagatcatcgcgatctggataaatagttccatcgtacgaagttgtgtacagtgttgaagtgtctgcagggtgttcactgtgatccgtagctgcagaacgtcgtcgagcaagcggctccgtcgcatgctcttgagtgtcgttactcccaaccagctcacacatgcctcggttgatcatgtagaattcgttccccacctcaccgcgtcgcacaataaagtcgtctgggagatacacgcgagtgtctagactcagcaccagggtcttctggaaatcgggtgaacagttctcccagaaggggacgtgcatggccaactccatgtacttgaacagtacaacctccagagtgaggttgtgtgagagttcctttgcaaacctctctaagggagcaccatccagagcttcgtattcacgccagaggtgagcgtagtactggtgtattcgctccctcagtggagctggaagctgcatcttggtcattccagcgaacacggactccattttccgctggtaggccgtcgagttggcgttgaagtttgccacaagcatcgcaacatggccgaaaatcacggctagcacaatggagccgagcagattgacgcaggacgcgaacacattttctctgaccgagtgcgtcgtgagactctgtccttgcagcatttgcatcgctacgtaaaaacattcagcatacacttctagctccacagtcgggtcgatcggcgccccgcatgttcttgccatgattgaagagggatcgacagcggaggagtcgatgagcagcagtctccagcagcacgccacacaatgcgcaataagcatgacagcaccaacaatccaaacaatccgtagcaagtgcgagtagcgcgaatacagcaaccagcctaatactgacttgtcgattcgagcgtcgcggacttgaccaacttctcgaagcaaccgcaagatatgaacgatgcgatgggaccgaattgccatgtcgatcagagtatgagagaaccgttggaacgcatcattcaccgactccaggtaaacagcattgcccgcgccaccactagtcattattgaagccgtcacgatcggaactgcagccaggagctggaacacgaacgaccccgtgagaaaattccaggcaatgtgtcgtcttgagaccaccagcactcctcgtttattgacaaagctcgtgttgaaagccagcaggaagtcggcgaagaagatcatttccgttgtagcatcaatggatatgaaccacgcgcggccaccattgtgaaaagcttcctcgtacggaaacccaagcgtgtggacgcaaaaggcgatgagcaaaatgaagctacgaacgcgcgcagttctggaaaacggggacatgggggtgcgcagtcgcgtgattaaggctcgcactcgcttcttgagacgtggaattgggcgtggtcggctccccactctcgaagtaagcttctgaaaattgtgatgatccagtgcaggaactcctcccgagtctctccttgctgctgatccctggccatggtcagtcttctcctgcggctgcgatagacgacctggatcctggtctgacggtccattgttgacaactgacgcgatcgaccgtaccgacccccctaaagccccgctaactgttccaagagtacctgcgggcatcactgacgctgtagctggaggtgtcacgattgcattgttcgagtggaaggacggagctccgggtcgacgtggactctcctctggtcttgagtccacatgcgattgagacgaccgtaaagtgtccttctcccggccgattgtgctgccgacctgttctccttcactccgcggacgggtagagttcatcaggtcgtccatcatacggcgctggctgagctctgagtccacgggggtaatgtacgtgctgcctcgtcggttggacgctttgttagtgtcgacatccagacttcgccccgagtctgaggtttccagacgacgcagttggaagcgcgccatcatctgctcgtagttttggccttgctccgtgcgctcactgttcgcagccgtcgcattcccacccgacgtcaaggctgaactaacgaccacagcttttgccactgcacggaacgacggtaccgtcgagctactcggtgtccgcttgagagccgaagtagtggaggcactcggtgttcgcttgatggtcgtgaccgttatcgtgttacctccagcttgagccgccttcagccgctcgcgaattcctgcaaggtgcgtgctcgtggctcgcttcaactgaccgcggggcgaggcacttcctagtcgcatgggcttaatcaccacctcagtcgtggtcgggtcgacagtcggtgcgctaaagcgatggccattgtggggctgcacgtctcctgcctttgtctccgggatggcttcagccagaggctccattccgcctgaatgccttcggtcgagcctcctcctcttcggacgctcatttgatacttgggactcggctatttgaacttcggccagcgctgcagccacggcggacgtggtcacgaggcgactaaagggtcgaactggtcccgacgccgtcttctcctggtctccgctgctgcgcgcctcgaccgtctcttgagcttcggtctgctcggcctgcagctcgtgggtctcctcgaaggcgacatctcgcgctgacttcgatcgaatcatcgatcggacggagctcagtgagcgcttggtgccatcccagtcgaatgcaggcgcgagactgcaagcgtcgagagctcgaaacgacggagcacaagaggcacacgccaagtgccgcgccgatatcctaaatttacgcgcgagcgagtctgagcgccaaggtcctgataccgagaaacgttcgcccaaattgggagcctggaggaggatgacgacactgccctaaatgacgccgtcaagtgctgctttgcgtatttcgggcgatgcgcttcatgggaccacagatgtctgacgaattccggaagacctcatagcacgggactgtgtttgttctcctcggaatagcacttcaaccgaatcggggtcggaagcgcagtaggatgacgagcacgtagctgctaaatttgcggcgactttcattgcaacttgagaccccgatctctcctaacgtcgcgcgaacttccagtacttcaacggacaagtccagggtcctgattaaatgcgatgccgttcatcgcttcatgagctcgccctccctccccccccccccccaagtcctgacaggcctcacacacacacacaacttgtagtaaaattccggaattgggcgtcctgggattgacgaatttcacgacaagtcataaaaatactctgactaagttagttagtcgacggagggtttgccctgctcgagctcttcgtcgaccgcggcgccactcttgacgttttcactcaacagcgagttgttgcgaatgagccccatgaaaaagtacatgaccagcactggcgccgccatgatcagtagaaccaccaggtagtcgccgccaagtccattttgcacccacggcgtgaaggcgtagttgagcagtcccatgaggaacgaacacgcggcgaggaacgcctgtacggagccgtagacctcagccgggaacgtaagaactgcaatacacaacagttaggattacaattccaccccagcaacaaacgatacaacacaaacgagcaaacaaacaacttacggatgtacgcgaactgcagcgtgtagaaggcagcctgctcaaaggcgaaaaggaccagcatgaaggtctgcgccgtgagcgacggtaccagcagcaagacgatcacgaggtgcgtcgacagcagcgtgacgaagaacacgacccggcagccgtacttgtcgataatccagcccagcagcggcgtgtagatgaaggtgccgttcgtgatgagcggctgcaggtagttgacgtagagatccccgaggctttcgtcgtcgccgtcattcttgtagataatgttagggatggcgccgccgatgaacgcgttgatggtcgagatccagccgaagaagagcgcgaagaaccacaggtccttgcggccgatctgcgagcgcagcgccggccacatgctcttgggcttggtgaccgccggccacctcatcttgaagcccgacagcgtgtacgtcttgctggtgagcgagaccgagttcagcgggaacaggacgaaggccacgacgaggcacaccgccaccagcaccgcgtagcccaggaagaacccctcgcgcgtcataccgtgaatctgcagcagcagatagacgtaaccggagaagttgaagagccccgacatgatgctggtgatgcggccctgctgctcactggggaagagcagcacgagctggaacgcgctgatgtagacgccgtagcccccacgccgatgagcgagtacccggcgatgatggaggcaccgttgccgtccgtggactgccccagagccagcaggacgttgccgatgatggagatcacgagccccaaacacacggtgaggcgtgcgcctatgacgtccagggtgatgctcgacgccacgttggcgaagctcaggcacaggaaggcggtcgagtagatgtactgcagcttgacctcctggctggcgcacgtgacgcccgagatctcctcgtcgggcgcgcagagctccgaccactggccctcgtccaccagcagcgagtacacggggccgaagcccagcacgaggccgcccgagcacagtacgacgagcaccgcggcggtgacgatcacggcggcgcgcggcacgacccacttggacatggagctctggtccacgccgcgcggcttggaggcgtcggtcatggacgcgtacggcgcctcggacgcgcgggacggcgaaggtgaagctgaaggctcgaccattattggggagctgcgtgctacgcgggggatcggcgaatggagacgcaacgaggaggtcttggaggaagggcatgtggtcatgttgtgcacgtgattggcccgcgttttaatccatgagccaggcgcgcctgcaacgcaggacgagtcattcattctcagatggaggaagggtcttcattcagtgctgcctcatcaccaagaccagacgccgttcaagcttgcacttggggcttccaccagggcgtttacgaaacgaagctaatgtagtggtgaggaggatgttctcatgagcgctctattcctgatgcgacatggtcggtgtgcaatccgctcttacctcccgccgcccctgcatgctcggcgaccggccccagcaagcaaccgaggtcgcgaagttgttcatcggtaagtctggggtctgtgctacggaaaccacaacaagccctacaacaacaacgcacacattgtaagtcttatttttgccacttgccagttttcaaagtcgaagccaagtttttcgacaccacactactcgtcttacagtgaaggatgacgaaaaagcataggctacccgaagcacttgctccgggagagtacacaggtcgcagggcaacaacaacaatagtgaatttgaataaataaaaggggagggaaactaggagcaagtggcggagatgcaggcatcaagtgctacggtacggagggagcattcgggagtggtcggattaaacagcaatttcctttcgtgtgtgcggtgtgatcaaccacataggtacaaagcgcaagaggagactctggattcactggttgtcgtttcttggagatcgagtgtggcaatcgcaaacaaaccacagcaaaactatctcttagtttctctcgttacttctggacatgccattcttgcactcgaaaagcttattggagatgtcgcggcctggtcgaagctaccacaagacgcatttgatgaagataaacttttagtagcgctgagcgaagctactttgcaggaattttacgcgtagtgaaattagtaactcacaagtgcagaagcaacatatcttgaattttatgtaagtacgaacactaactaccgtagtgtactaaataggacaaactggatgcactagtgatcatgtagtcagtgatcaaaacttcgcaaaaggagcggcgtttgctggtcttactggtagttagttaatcatgagcgcagaatcatgaatatagaagaatatattgagctaagggaagtgtagaatttttgcagttgaaggctggattcgtagcttttagacgtaattgttgaagtcaacaaataccctatctcggaaacaaagtactccgtttcagtaagcttcagtaaagctccacccaagcacagctcttcgaccttgtgaattcacccggaaatttagaattagcatcctagatttggtagctaccagaaccagaacgtaatgttacagtttccagtgcgcgacacgatattgcagctcagctgcagctcactacaaggttgctgcgctttggctgggagaccatttttcaacttagtattttttatcgtggaagtgaaagttctgcatggttgttcacagacagatagtttacactaaagatgttcagatgcagccctccgcaatctaaaactctttgaaagtcgacgcctttacttctaattcgcgtttgtatcgaacctgttgtatattctttagaggtcggtgcagtagttggtgaactgcctgtggaactacgcctactgcagctttcgagaaccctagcagtcggaggcaggcagatgctgcggctgcgaaacagacgcaggagacgcctgtggatggcggtttagtagcacaaaatctaacctagaacaaaatttgagtcaagaagcacggttagttgatgataactacggccatctactgcgcctgcttcgcagccgcagcatctgccggtaatgtgcaactggagaagtacgaaatgatattctagtcaaattgaaacgaacaaatgtttgcctactttcttaaaacttgtgaagagcgaaaaacttccaaagaagtgttttgttttgagaagtttttgtaccatcgctaattgcgttacctgtaactgggaatacattcgtgacgaattaaagtttgtgaggctggtaaaccagcaagctggtctcctaggataatctcaccggtgggggcatcctcagcttacctcttaggtaagcttacgtaaggtattaggaaagcttacatgtaccagcagctctgtagtagttaaagaatattcagatttaaatgtgtctaaattcagtactctaacagattggaccaaattccaacttttggtcaaatctgccatgtcactcaattgtcagatgacgccgtccccgctggaggtgctcagcgcgacgctgctgggctccgtgcccgccgatgcgtcggatcaggagctccaggacgtggactggccactcgtgtcggcggcgctcgcggcgctgcgtctgcgcacgcaggaggagctcacggagctggcgaaggcgctggatccgcctgagaccgctgcgtgtgtaaacccacttgaagagcacggcgaacttttagcagtgcatactggaatcaagtcactccagccccagctcacagttgcagagcagcacttcacccagttggagagcatcgcgcgccccggactcgacaagctgcagacgctccagagtcgagccaagtacctggaagcggccgtgcaagtggagaaactgagccaggaagccaagagcagagccgtccaagccacgcccgacgccctggaggcttttcgcagttttgcggcttttgctgctgcaattccagagcagttcacggccattcgagtaagttatttattgtttattttgctgaaagaaaactaacgttgtagatttgtgaattgattttttcttagagagaagctgcgcgaagggtggaggacttgtcggtggatctgcgccactttgcagtcgagaagttgcaactggcattggagaagatcaattggcccgagccgttggccacccagcaggagataactgacaaggtggagatgcaagtgctgatgtttggtaaggaggcggaaggttgaggttctgacgctgatcatatattcattttttgttgttaaggagacaaagctgcgtgaggtatccgatgcgttcgggtacttgctcacgctgcagcttagccagcaggcgcagcctgtgtcggcgacgacggatctgtgggcgatggagtgtgtgctagacccgttgctgctgcgatttcggtatcactttgaacgaccagagagcgcaacgaaccgactagcaaagcccgaatggtacttaagccatgcgcaggagcagacaaacgcgcacacgcgctttttggcgcacacgctcactccagaactgcaccgccatcgtgaggaagtgcattgctgggacgcgcagatcctgctactccgcggacttgtcaaggctgtctgtcgaaagcttacacaagacttgcctactctgctggcggtgagttgcttggatactacgcgctctgcgtccaattagtattgatactgatcacctgtaattcttgttatttggcttgacgaacagcatccaccgttgttgtgtcatacactggatgaggtccttctcttcgagcagaatatcgatgacgacgttggatacggttcctgggctagcgccgaccgtcgcgcgtacccacgctgtgtagatgttttcacgtcgagcaatgacgtgcttttctcctggacgagcgctgatgtcgagtacgggcatcgtgtgctgtcatcgagtcttggggacgagtcttcggatgatgatttcgacttcaatgcgtctcgtgctaaacgggaatcgatttggcagctggaagacgcggcatacggccgcctcgaatgttctgcgccagagcttgatcaagatctggttcccccggcagcgctgcggtttgtgtccttactggatttcctctctcagcgcttcacgctcatggagacagaagagcaccgctacttgtacgtggtgcaggtgcacttgccactgttgcgtcgatttggacagctctgtgatgcccgaggacgccggctgatcagtgctctggccaagaaaactagcgatgcgaagacccaaaatgcgtgggcggagctattcgttgtggtgaacgcgctgcagcacgtagcgcacgcgctggcggcttgggagcagagcagcgtctttttggagctttcgaagaaggttgcgcgctcggagacgacaagagcccaagtgcttcggatgcacgtggcttactcgaagcaggtacttgcgcgcgcctcggccgctgtccttgctacagaagaagccactgcggttcgacaagccctcgctggaccaggagcgatgatcgggcccacagctgctctttccgcggcttattcggtcgggtccaagacgatgaagagcctttttcgtcgtgcagagaccgacggcaagacagtcgaccaagacccgcagcgcccatcaatggatacttctccgccggctgctgctccgaacggcaatgacagcgcttcgatcaacaaccaccaagagcaagacgatcctgagacacttctcttctcgcacacgatattcgagcggcagatttcggagctgaaattactggcggcgacgctgctcgagggcggcaaggacacgctggtgcgcgcggccgagcgaaacgttggagcctaccgctcgaggtaagttgatgtttgccatggtatttcaccacttcaaccttgtctgactcatgcgtgctcgtgtgctgtgctgtgctccgcctgcacatgttatgctagcccgttttggacggacacaaagtatgacgatgcagacaaccgtgaggagctgcagatcgtgccaggggtttcctctgagttggcgagctgttacactcttatcagtaatacgctgaggtgtgcgcgcaaggcgctggtgcctgaatattggcctgctctgtggaaacctctggcatccgcactcgataccgctctctttgatgcgttctgcaacccttcagcgacggatgagtgcactcagctcagcagatcgggcgagcgtcaatttgtcgaggacatccgatcgcttgtcgcgatgtttgctgcgggttcgtcaaagccgctaccgcggtcgtacttccgtctaactcgcgaagtgtgccacctactggagatgcctgcagcaaggctgcgtgaggtctacaaagctcttgatgacgagtccaccgaagaggaagttgctgacgggctggagcagctcacgacaattttggaggcatgtggcatttttgcgcttacaccgccccaagtcgtgcggatatgcgccactcgactggatctcgaagcgagggaagctacagcgccggcttcatgaacgtaatgaccccgaagcaccgactttcatgaacctaatgaccgttaacatgaacctagtggccgttaacatttacccaaaagtttcagttaaacttgaaaaacacttgggctgtgcagcaacatgtacatgtaatagagccccagatgatgttagagcaccaacgtgagaagagaagaggaagataatgcagctggtgtataatacttagatagataagaactacttagtaggcttgagcttgagcagagggaatcaccatctgcagtcgctggtcgtgtggtcggttggttggctggttgactaatgagccgtcgcgtcgataaaattgctggggaccatggtggcgccctgcaccacgcgggacacgtccttgagattaccgagcaatccgagcagcggtgtggccatgtcgatgtcggtctcgagtcgaacgacgaggctggtcgcctcatcccacacgaatagaaccgagcacggatacacgagcgtgtgtcccagtatcttcactgcgagggacagatcctcaacgttttcagagcccatgaggtgcgggaagacgcactcgagtgtggtcttagtgatggtgacggtgagcatggccttggccgtgacgatgctctcggacaccttctccatgtgctcgagctcgaacttgaggttctcgtggtactcggacatgcggcaccagtgctccatgagcacttcgacgccactcacgttgcagaactccacgtcgggcgccatggtggagcgcaggaacatcaactgctgctgggcctctgaggtgcgtagaacatcgctcgggatggcagagccctgctcactggagtcgcacactccgtgacggaagagctggaagtactcgaccacaacgtcccacacgcgctgcttcgagtcgtaccggagacgccgccgctgcacctcgagcatggggatctcgtctcggagctgggtgacggtcgattcaagcttggccacgtactcacgctgcttctgacgataccgagcctggttggtgcggcactgctcgcgacatgcctcggatttgacggacactctacgcttccgcttctgctgcttggtagcgtcgttgcggtggatggaaagagtggcctctgcagccgcgacagctcgcgacggcgactctgccggcgcaaaacctgcggcaggccgagaagggtacggcagagttacctggccaaggtggttcggagcgaatctgcgcactggaggagccggggtggcgtcttcttgaagccgtctcggcaccggtctcaacgggaacttgtcggccggttcggcggcattcgtcgcgctgtgggccgacggagacaatttcctgatcggtggcagcaacacggtggacgaaggggttgaatactgcggctgtcggtgctggaaggcggcgttcgggctgtggtggtggtgacggcggatagtgtggtggttgctcgacctggggaggtggtatcccggggctgccgcgcgcgttaggacgcttccgatcacggtgtcgctgaacggcgcgggggtgcgatcgaagttcctgggatgactggccatcatttctctctatttgacctatgctattgacggcgagttcggttgtgagacccaaaagggggagcgcgctgcgttatcaaatgttggttcggatagccccgccgcgcaccgtgaaggtgtcccagctggcacctgctcgttctgctggattggaggccccggaggctcaatagcgtcaggcgtaaacaagccgcgacgctggagatttgaattcgtgcttgcattatcgcggttttggggccacgagtatgagtcaggccggcaacaaaggcttggcgttgaacctaaacgtccggcatgcgactttgagcgtcggtgcaacggctgtcactgctcgcacctgtctctctttcggcatgaccatggccaaagtaccatctgctgcccatgataatgatgaacctcgcgctcaaccgaccgaaaggtctacagcaagcatcccacgagcagggcatgagcgagcgaaacgcagcccgctcacttcaaatcacgagctgggttctgctgctccctcggataagtacgaccccaacgagcagctcgtttgaggagtgaactgataggctaaaatggctcagctttgtggcagcatcacactcaacagaggtgcccccatcagcatgaacaactgctctgagtgcaagttaggcacaattttttaaagtaaatttattgttatccaattaatgtgtggatctttgattcgcgctcccccctttaaatcgatttcatgtgagcagctacagatcagcgagcgcgctcatgaggttttagctgctcgtgctcgttcccgcgagcagtgctcccgctcagctcgtgggatgcttggtctacagtacaacgcttggggcaagaaaccggagatatgaacaaattcaaatctgcggatagtgctgagtattcttttttctggtcaagaggtgtatgcgttgggaaaacgtttgtcaataggtgtagtggtcgtgggcgtcacgtcgcgtcatgtctcatcatacacgtactgacacacgttttggttgccgcggtatttcggctgaggtcgggtcatacagacccaggatcgagcttccaagcacagtagtttattaacgacacgctcgtagcgaacacggtcagctaataatagcatatagagcaactgtactcgacaacttcgctattgtagctacaaggaaccaccaacgcaaaccgcgagcgtatttagcatggctatactaggtaggttttgcatctgaatttcggaggtgaaggagatctagtgaaagcccccaaccgggggagagtgtaggtattgtagaactgtggcaacgctgaggcctggctacaatggataacgacgttcgttgtagtccctcagccatacaattcgctatcaaagtcatggacaccacgaaccgggctagttgcatcagatagaagccttcctaaccccgggtttatggatttggatctaagcccacacaccagtcaccgcattcgttgctgatgctgctttatcatgcaccttagtgcgcttggaaccacatacacatactgtcataccgacaacctagcatacacctaatgacacgagttaaccgcttttgacaaaacgtttcaaattcatacaccttttgacgttttcccttttctgggtgtttggacttttggacaaacgaatgcaccggcactcaaggcgagagaccaggagtccggaccgcatctttcgagtcgagtcgccgaacgttggcgccaagcagcagcgatcgaacggcagcgcctacaaactcttgcaaagtgctgtgcagaggcaagtccgaagcaccgagactgctgtgcacgtacacgtaaaggtgtgaccgctttggaatcgcgtcggcctgccgtgcttactatcttcattattaaaatgctgggcttgccttgatcctgccgatgtgaacgtcaaccaatagggcatttgccgtcggttgatgccttacagtacgtaggtgcatctgtagcgcgaaatcccgcacatcgcacgagaacccaatgcagcgatcgcacggacatcgcttgctgccttacccaaacctgttgtttgtccgctggtgcagtccgactcggagtactgaacggacggacgatcacatgccggtcggcaccgcctgctaggtaatggcacctgcaccgcatggctcgtagctacatgattagcttgggggcagaataatcgtgcgacaacagcttgatgctcgcggcgggtaattcccaaaatacggagtgctggggaaacttttgacattttcaaccttttgcgaccaaacacggagttgtgggaaaacttattcccaataccagcctatagaatcgtagaggtagccttcactggagactcaagagcccacgtgctggtgcacgccgctgcggacgcgccgctggagaagacgctggcagtcgccgccatcatggacggcacaccctccggtgccttgctgtccccgaccgtgctgctgcagtaggagagcgtggtgcgctcgaacctcggccctgacactgacaccagggacttgctggactcgccaaccgtggcctccctgggcgagctgctggccaccaagacgctggtggctgcaggagacaaagagcgtggtgaagacgatttccgtggccattgtaggcacgctggacaccgagggcgagctgctggagaccaaggacgtgctggacccgaagaccatggccccgtggacgagctgccgaagcccaagggcgtgcagggcccgacgaccgtggccgagctgctggacccgaagaccatggcccccgtggacgagctaccgaaggccaagggcacggtcaagctgctgtacaccaagtgcgtgaagcgcgggacgcccgtggccgagctgtggtacatcgagggcacaaccgtgcgtgtaggtaaatatagcaattccatttctagaaatgtccagtgttcaaatcaaaacccggggtcaatgccttcaatgtagtctgcaatgttggggtgtgtcagtcttagacagtcaaaacgtgacttgtattcttcaggactagaagctgcttgtagtccgtaaagtaccttggccatatcaacggggcactgacccttgaacatcttgtttatattctgtagaatatgtctggtgcagaagcgaacgtttttgtatccaagagtgtggaacgctgcaagaatgccagtacctctgtctgaaaaaattgttagctttctaagagggacaccacttcgctcacaacaacgcaggaaccacacgcaatcatcttcagattctgacgcgcaaacggcaatccccaacagcacattagccatgttgccatctctccccaccaccaccaactgtgcgcttttgtatttgccatgcttgatgaatgccccatcaaccccaacgatattttgggcatggtcttgatactcatgagcatacggatgccccaaaaatgcacatcgaaatcggccatcactatcccattcagactcagtgatagaagtgggattctttgttgtccacgtagacagcagagaacgtaggcggtgaaatccgtcctccacagtcccaaacagatcgtcaagaatcaactgcttgccacggtaggcctccttcaaaggtatgtccgcgcccgatagggccttcacctgatccacaatcgtgcgccccgacacattagggtccgatgccacgaatgtacgatcaattccatagatcgcagttgcgatgccgcaattttagaccggccgctgcacatgttgtgttcaaggttgcatttgctaatgcgataaccccgctgagaattggactgtgcacggcacgcagcaacctcaaaacaacagaggtcacctcctttgcactggtagcgaaggtaggctcctccagcagcagttggatccagacgcacagatttccctgtacttgaggcaaaagccttagttgccttggtacaagcacgttgagaaccaaaccactggccgaccgatatgaaggatgtatcacctgcactgttcacaccttcaacaccttccatcgccgggaaaacaacccgagctaccctcagacgatttcaccttttttgcgttttgaaaacaaaggcaaagcgacatgaacactggacatttctagaaatggaattgctatatttacctacacgcacggttgtgccctcgatgtaccacagctcggccacgggcgtcccgcgcttcacgcacttggtgtacagcagcttgaccgtgcccttggccttcggtagctcgtccacgggggccatggtcttcgggtccagcagctcggccacggtcgtcgggccctgcacgcccttgggcttcggcagctcgtccacggggccatggtcttcgggtccagcacgtccttggtctccagcagctcgccctcggtgtccagcgtgcctacaatggccacggaaatcgtcttcaccacgctctttgtctcctgcagccaccagcgtcttggtggccagcagctcgcccagggaggccacggttggcgagtccagcaagtccctggtgtcagtgtcagggccgaggttcgagcgcaccacgctctcctactgcagcagcacggtcggggacagcaaggcaccggagggtgtgccgtccatgatggcggcgactgccagcgtcttctccagcggcgcgtccgcagcggcgtgcaccagcacgtgggctcttgagtctccagtgaaggctacctctacgattctataggctggtattgggaataagttttcccacaactccgtgtttggtcgcaaaaggttgaaaatgtcaaaagtttccccagcactccgtattttgggaattacccgctcgcggctgaggcgatcgcatgtccgctcgttcgacaatgccagttggtgggccggacttgatgacttgatgtgtgagaaggtggaagtgccccctcgacgcacgaaagagctttcgtccgcatgtacctgcaacttggtggcacgtagcacggagttacagcaaactgtgtacctacctattgctcgggctttgctcaaacaacacctcgagactgacagcgttgtggtgccgtttgacaagtacctccttccgctgacactctggctcctagtagagcgggcgagaactcgtgtgcgtgcctgcgtgcagcgtgatgcaataccaattcaccgtcgagacccccgttgcgttgatacatgtacatgcaccggcgtcagtacgtcatccggctcccttcccttggagctttgagcgacgtgaagaaaaagaaaagatgaagaacaattcgtgtcaggatatccttcccagtcaaaattatgttatgaacgaaaaatatgttcaaaggcctaagtcaatgcgcagtgctgtgcattcattcgtctgcataagctttacaaagttgcaagatggacccaacttcaaagattagaggcttttgtttcccaaaagtgaaattttgtgacgtgcacatatttgcaatctcatggtgcgaccaattttttgtcggggaaacgctattgtggaaaccgattagattgcccgagcggattagctgataaagcagcgttcatgagagatttgactggtactaaatcggggatccttgtgatttcatatggcattggtaagggtataaatcagtgtatggttaataaaatgggggttgcctcattacccgccagaaatacagacaacgacttacaaagccggcatgcttaatgccatcctcctatataaaaacaacgataaattccctcccgtcaaatctgtaaaactgtcataaaacacacggcgtattgcataaagtacacaagaaagcatataaagtacacaaaaccagatggtatacaaagatgaagtcatttgattgaatctgattggctggtttgcttatgttaagctttgcttgacttcgtctgccggctttgtaagtcgttgtctgtacgacgagcgaccacttaccgccacgagctgagtgattcgcgtaccggtacctactaacgagaaatagcatcgcgtgtattaaatacgcttctgtgagcttcgatgtgtactgctatctatttatcaagttctgaagtcatgtatttgcgctgtcatttctcgtcagcattagcgtttgtcggttttacgttaaatcggccaccgaatgccgtgtgggtgtcggacattcgggctgattagcatgcaaatcagccgtcccgggctttgtaagccgtggagcagctaaatcagcttgccacatggcgttgtaggcacaactgaccgctctgtcaaatcagagtacaaatcttagtgtgccgatctaattaggaggtcggatttagcaaatcagacccgattaagcttaatcatctgcttaatcgaccgatttatatcccaattagacaatctaatcggtttccacaataaaacatgcctatttcggcgaagtgtttgcaaaacatgctgtccactttaaaacatgctttccgaccatcggacgattggtaacgataggtgttctccgtaattcgacgatctgcacgatggcgcctcaacccgaggaaggcatgaccttccacgacgggagcgctgcggtggaggctattcaagactacgcattgtccattaagaagcgggtcgtcgttgtcttgggcggaggtggtcggaagcggctgacatgctcgtctaaatcgtgcccaatgtacgtgcagctgtaccagcgcaagaacagcagcgcttggtgcatcaactcgctggatctatagcacatgaactgcacttcggtacccaagccaacagctcggcagctttcgcagctaccttcctttcgaagcagcgttttggccgacccatcggcttcatttgtacaagaagtcctgcaccacttcactatatatcggtaactcatgtaaaacgtgtgagcccccgaagcacttataagtggcgcgataaatcgtgctatcatttttaagaatgatctggtcttcatgttgcacttgacttgccagcgccttggccgaagcaccagcaaaagttgtgcatgcagtagggtgatgttgcagacgtcttcattacagtgcatcagtggcagcaagtattggatgtacgactcgcgtgtaatatatacatactagctgccctcattaggttgatgtagtggttgcgcgtcgatgccatgagcttatatcaatgtatgtcctgggatcaccaaggtcgtgcaccggcgttggtacagtgtacccaagcatgttttaaagtggacagcatgttttgcaaacacttcgccgaaataggcatgttttagcgtttccccattttttgtcgtttcgtatcttacagtactgtaagatggcttcgcaaaaagcagcaaagtccaggtaggtaaagtatctacgattaagtatgcgatacctactcagtgtttggctttctctccgaaattttagcatttccaagcctcaggcctcggcacgattagtccttcccaccgtggggaggactcatcgagcgggggccacggccaccaccgactcgagctccttcatacagtacgattactcttccccacagcaatcagatcgcgcgcgtcgcggacaccatcgccaacggttgttccagcccctgtgttcacgcgcgacagcttgccttcaagctaaaatgtatcgcaccgttcaaaggacatgcagcgcgattcggtgcgctttcgctgaagcaacttgtggctgcgcgcgtgtttgcttgcacacgcgtcgctcgttgtcaacgtgcgcctctgtcatacgatggtgtcctggatagttagggggatgcgactccccggttgcactgtacatgtccctgaaaatgaccaacggaaacgcgtggtgctgctggtcgcgaattttgggctcctgcgtcttcctcggtcgttgtttgcgacgtcgccttgtgctacaagctaaacactgactcatgtactgtactcaggcaggataaatggcccgtgctcaatatcctggcgccccgccgccttctggagatcaacaagataagtctgatgaagacgtctgggtaacgatatacatactctaccacatagcggctgcatcgcaaacagaagcagaagagaatgatacgtgttgtgctgtcaatagcgtgtggctggaccagccggtatgggtttcagctgccgtcgcttaattacacttgacctgcgtgcttgcagctccgcagctacaaaaaacaacgacagcagtgtgcctgaatttcagcggcactcactgatttactatttggcgaatcgcacaccaagagtggtgcggaggaagtccagctcgtcaaaatgcacggttccgcgcacaacgacaaactttgagtgacgcctacacaggcagttgtagtctcagaggaagcttgaattacgcgctctacagcataccgccgcgaagccaatgtgagtgctctccgcttcccgggatcggaaggtatgtgttgctctgacgaggtgaggcatgcgtgcgatggaatcacggtgatatgtttccaaattaacgataaaggttctcctgtatgtctgaatttattaggagaccgcatcttggattccggccgaaaacgcacacgcatgtgagtttggtgtcagaactttgcttatatatctgtttctgacgccttgtgattcattagataagaagggggcaccaacgtccgtttactctcgagcatggcagcatgtaaggcggcggcagcaagacgcgatcagccaaaggatatctggagtaagttttgtcggcccatacatgtacagtactgtaatttgcccgtctggtctacgcagattgcagtgatttctcaacttgagattatcaagttccaccaaagtatgcaaatgccattagccgaaagtattgtgcaagcaacagcatcaccaggaacccgttcgactcacaatggtgtggagatccgggtaagtttggttgggtgcggtatgattatcttcttatcacactactgaagcagtaagtatgtgagtgtattgcaaacatgaatctgaaaactttttggatcagcgctggttcgcgctcgaaatgagaaagtggcgatctgtttgttcagtttccctatgccttcgcaccctcgatgaggatttctaccgtctaacgagatgcagcgggacgaccgtcacggcttgagcaaagtctctttccaagacgttagaagactacggagcgtaccagatcccgaatactgacagcgccgtcccgcgtgatcattgcgtgttccagcgcgaccgccacgtcggacagatcgtctaaaacttttgtcaaaggcgccataaagttgactgtcgtctcgagacgcgcgacacgggccttcgccgggtcccactcgaagcagatcgagcaaggcaaacgcagccgctgccccgctaactttgaccggagcgacgaggcgtgatcattcagacggcgaggactctcaacttgtccttggtcgtcctgcagcaggtggggaaagatgctccgtagcgtcgcttccgacacagtaacattcattttggccgtcgcactcacgaagttgtcgtccacccgctcaacgcgctccagctggaagtacaagttctggaaactcgtcgagtatcggcaccactgctccatcaacgcgtcgacgccgctgcgttcgcccagaagcacgtccttcgccatcgacgtccgcaggaatgctagctggtgcttgcacttcgtgctcgcacctgttgccgcctccatcgactccactgagagcgacacgggcacgccgaagcggaagacgtggaagtactcgaccacgacgttccagacgttctgctgaccgggttgcgctgcagctcgatgtcggcccgcagcctctgcacatcgagtgtgacttctttggcatggttgagttgctttttgtcggtatctagcctggttggctcggcactgctcgcgtcgacgctccgtcttgggacggacgcgctttcgtttctgctgtggttgggcatcctcctcgtctttggcttattccgtggagctatttgcgaccagaatgagggcgatctctgaactcgttagagaatgctttacttcgacgtagaactgcgtctcggtggccttccttggggctggagtctggtgcatggggtttacagactcgaggactgaagtcgtcgatctgacagtagcagggatgggtggaagaccaggtttcatcgagaacaaacgctctggtgtgcagtctcgcccgttgccgtcgggtggagagctgttgtagctttggctacccgctttccgctggaagacagggcgtacgatctcggagctcagcgccagccggctgggagtcactcgccgtggcttaaaatcgcgaggatcggaggtctgcatggaataacgacgggggacagagacctgtaaaagacggcgaggggccggttcgtggacttgtgggagacgaattgggaatgaggcgacaaccgacgtgatcctcctcccagcaaacctgtacagttatttcgataggcagggctctattgcatacattgttgacgtatgatcacgccgagcaaagctctccctcgatttggcacagcacgatagcgttggaggacaagacgaaagcagccgtcgatttacatgtactgtagtttgtccgtattatggattaaactacctattggtatattttgtaatggtaaagcattacctacttttaattcagcattaggtgtaaagtaaaaaaaaatgctaatgaaattgttattactttgccgtctaggactgacgacgttggaatggtagctgctatggtgtgtggcgatgtgtgtccaggaaactcgagcgatggggtagctaaaaggaaggcacgtgactggggaccaaatatcgcaatgcgcaggcttgtcactctcacggcatcaacaagcgtatcgcctctgcgcagctgatcacccgaaggtgctgttgacgctcttcgcggccgttgtggctcctaggagatttgtagaggacaggactggcacgcagttggccttccaccctgatcgctctacgccgacaacccggagagacgagagcactggtgtgtagcccgcttcgcgtgaggttgaggatgtggcgctcgccctccaaacctgaacttggtcttggaaatgcctagcggtatgcggttgcagcatcactaccgaactgtggattgacattgcgctctaggtgatcgcgccttcgataacgacgcgacgaagcgccgagtccggactgcgttgctagtacggtacgcacgtaagcgcaaggtcaccatgacgcaaattgtgacatcgctttgatttcccgcaggctgagggggcgagaacatggacccgcacacaccgatacgaaggctggctggcgtttgtcaggttgatgccctattattcttaatatacaaagagagaagtttgcagctgtggtgctattcatgcttactacactagctatcgcgacgttttagagatcaaacacgccaactgcgccgtcgcgcgttccagcaccaacgccacgtccgccacattgtccagggcttccattaacggggccatgaagttgactgtcgtctcgagacgcgagacgcggcagcttgtagaatcccactcgaagcacactgagaacggaatccgaaggcgctgccccagtaacctcgacgacaatgagtactcactcgtgacgtacgggaagacgcccttcaacgtggcttcactcaccgtcacgttcatcatagccgtcacactcacgaacttgtcccccacacgctcaatgtgatctagctggaagtacaagctctggaaactcgtcgagtatcggcgccactggtccatcagtgcgtctactccgctgcgttcgcccagaatcacatcctccgtcatcgacgatcgcaggaaggctagttgatgcttggtctccgcgttctcgacgcagtccaccgttgcgtctgctgtatcgaccgactccacggggagtacaacgggggcaccgaagcggaagacgtggaagtactcgacgacgacgttccagacgttctgctggccgccgtagagcaggcggttgcgctgcagttcgagcactgggatatcagctcgcagcttctgcacggtcgcttcgagctccttggcgtggttgagttgtttctgtcggtatctggcctggttggctcggcactgctcgcgccgacgctccgatttgaggcgggcacgcttctgcggcttcttcggctccgagctgtccgtttgggcgttgttggttaccgtccgcagtgcgtcgacggtcttactggacaagtatctagcagttggcgcgtccctggtcacgctgaagcgtgaaggcatgttcgatcccgctggctgcgtgtatccagaatacgctgagcttaaaggcaagacaccggagtagtaggagtctgactctggtgacgacggccgcttggctcccctcgtcggcctgctgcctgcttcgacgtcgcggttcatcgtgctgactcgtcgctggaacactgggcggacaatgtcggagctcagttcgggtctgctgtgctgcggccgttgtgagcagtcttcagccagataaatggtctgcatgttaatatagcttgcgtgggctggtttgctggcttgggggcgaggcgataaatcgaagatgaagggggtgagtgagacagcacgtgatccggcccactaacctcagcttacgggtcaacagggacctcgttgtttacaaaatccaagccaaagagtcgcttgttcgtgttgatgccctcggtgccaagcgactctccctgcagatttgaacggggtctagggctgtgtgttggagtgggctgatcattgtagtacagtaactgcgcccacttcacagtgtacaatgaaggatcatcttcattccatagcaccaatcgacaaaggaaggcctcagtgaggtactactggtacatgtagttgaccaaccggcttgtcttctatgtagtccattgtccccgtgccgttgcttacaagtttcatccctcccacccccacataggcaacccggagcgttgctccgggagggtacacaggtcgacgaatagtttcatggacgatgataacggataataattgagtaaatcccaaagttgttttgtttttaatccttaaaagcactaccagcccaactctctagttgattctaacgtgggcatctactgtgcctgcttcgcagccgcagcatctgcccgataatgcgtaattgaacaaatagttgggcacatcgaagtgtatcgatacggaaatgatgtttcagccaaacctttgtgaggctggaaccagcaagccccgctcttctttatcgtggtgggttctcaggaaccgaaagtcaccaattgaggttgcctggtctgatgaggccatcggtgacataacaccctggtcagcgtccaatggctgcgttagcgccagtaacgagagagctatttcattcattttgcaggtaaggtatactgttgaagcgggctcgcttgtcttgcccgagccgctgggcaggtcgtatgcccacgctgcgtattcgcacgtgagtcgtctcactcttaacaccgtagtggccgtcagaggtcactcgatctccccctgccggaacgtccgccgtcgcgtccgctccaattttattaagaggggtccttaaaccactcctactgctaacgaatagacactagtttacaccagcacctactctaccgtcttctccgtgctctccagcacgcttgtcagctcgtctctctccaagctggcagattctagagtgtccgggactctcggccgcccgttccccgctctgccaccgtccttcaacgtcgagtcgacgctggccctggattcaggccatgcgtgctgccgttcgtgccactcagcgatatttctgtcactcgtctctcgtccagcgccgtgccttcgaggtactggacctccatcgtgcagccgatcgctccgcagtcgccctcgtccagcatctgcggcgtgtcgccgtctgtcaccgccgtctcgctctcctcgtcgtccgtcacgttcgtcacgtccaccaccactgtcccgctcgcctgggtcctcctgccgggccctcctgttacacgacttctccaaaataagggtcttccacgaccttccgtcgtgctatagtttgtcgtacgcgctgaccaagacccagcgcttcgcgccatacttcgtagttcgtccgtctcgtcctctccgtagattctgcacctcgtactcgatggtgtactgccctgcggcgttccgtcgccgtcgtcgccgaagttccaccacgaggacacgctgctgctgctctgctgtcgaactctcagctgttcggccgcgtcgtctcgaagtccctgcagctgtcgctgcctgcacgcgagccctctttgcttccacaacctctccgttcatcggctcatcactcccgagttcaaacgtgccttcatgttcgagctgcgcctcgatatctgccgccaccgtcttcagtagtgtaggagtatagtaatagctcaccaaaaataaagaatgcgctataaattgttctggctcgcttgccacgtcctcacgctccaccaggtagttgtcgtagccggctgattccaccacacgtactggcccaagccattggttcaccaatttggaagctttcggctccctcggaggctgatacaaccacaacctatcaccgggcgcgaacacgcgcttcttccgcaccttgcggtcatagtattttgcctgccgctcctgctctcgtttccgtgccgcctcggcacactcgtgacgcttctcaccgctgtcaacagccgctcgtggtactccgtcaagggtcctgcttccgtcacactcgccgtccgcagtaagtcgttggggttccgcaatctcctccccatcctgagttcgttcggggataacatgactgtcgaatgctgtccgctgttgtaggcgtacacggcgaagtcgatccagacgtcccaatcccgctgcttctcgtcgttcatgtacgtcgctatacagtccttccatgttcgatgaaagcgctctactaacccgatcatctgaggccggtagggcaccggattcgtctgttgtgcctgtagcatgatgaccagttgttcaatcaccttgcccgtcagttcgggtgctccgtcggtcagtagttctctgaaagcaccgaatttcaacaccacatgcttcatcaggaagctcgccacattctcggccgtgtgtcgcttcacagtcaccgcgaccgcgtatctggtcacgtactccaccgctgcgatcacgtagcgctcaccgccactcgtcgttggtaaggggcctgccacgtcgagcgcccaccggtcaccaacatcaccacctcgcaggccccgcaaaggaggaatcacttcccttggccgcgccttacgacttccacattcctgccagcctcgtacccatcgcttcacctcgtttcatagtccgggccaccagtaggtttgggatatcctcgcgtatgtgtgcggggttcgcggatgccctgcccacactgagtcatggcactcctttgtgacaaggtcggtgaaaccttttacgcccaggtgtatagcggtagcccagaaagggtagacgagcaaacctttttgggaaagtaaaccctgaacgcagatttccttgaacgcaggttctgggaaaaatgcggccagggtggcgtggcaccttgtgaatccctatcggtgtcgtttatcttcggggagcctggatcgatcaccaggtgagttgtctgtggggttgagagccttgggttcattgagcgtaacgttcacttgtctgaacgcacttctccgaaatggctgaagctcgaagcgtgggtgaaggatcagggttactaccacaagttagaaccccagaaatacacaccactttcagacaaccaatacaaatgcagagttatacacaaacacacagccgccacttattcttagacccttgggcggtgggtagtacaccagtcaactaatctgcgatcaaggtactggtcaaccttgaacgcactttcacacgcgcaccaccctcagatgaaggaaatatacagaccaaatacaatccgatcctaaacgcagtcaatcaaactattctcgggggcgactgctaccaaaccacccgagatatcaatcgttaacatgaaatgggacaccacccttacctcaacgcaatgggcccaactgggaaatggaatacgtggatcacttcagcagccggagcagactgatccccacgtaactggacttgaatgtgtgtggggagctccgcactgctcttgtccttaaagacagcggacccgattcctcgacgacttgcgcagtagggggtaaaacgaactctctgattgttatatgctagactatcgctaggctttgtgtaaaggtatctctctcgtagcgttcttctgtgttcttctgtgttcttcgccacacgtctggcgaatgtcttgacttgagtatactagaactgttgacgtagacattctccactggattcttgcccagcttcaatgtgcccatgtctttgtgcatgactggctcttgggaaaccttggccgcatgcgaccaaggttcccttgaacccgcatccttgaaaccgggtttcagagtcagcagggctgaacgcagtgcgtccagggtctgctgccaaaggcgacttgcgtccaaggctgaaaccatactcaagaccttgcggccaagggtaggttgactcttcactgggtcgtgggacacttggcggggcttcttccgggtgaccagcggtctggacaccatgtacgcgactttactggggggctgagctccgggtacacgcattcgatgtgcgttcagagcctaggcgaggcgggacaccgtgcacgatacgttcgtgcaggcgttttcgacggcctcaatgtgtcaacccgcttaaggacgggggcggcctggacggatcgagtgcgttcagggtttctcgtctgaacgcagtcttccaggcctgaagggcccatcctaggcttgagcgcacttcgctccgcggaacacagccgaattccagctcagatcttgtcgcacggtgtacagtcgggtccgggttcagtctcggccaatcagaatggcgcgttcaggcgggtcagtagacaggtgataaccggttgaggcaaaacctcgctcagtctcgtcacaaccgtcccttccagtcatggtctgtcatagaggaaattgcatccgagctggcgcatcatggctggaccgaagtctgatggggctgagcttgaacgcagttctgaagcgcgggcagttggccaactgccacgcttgcgcacgcttctccgccctgtcctgcttggtcagcaactgtgaaatctgcggccagactcgtctccaaccacaaacgccattccggctttccgtatcattgcaaaatcttcttcaaacgcgcggcaccgacgcacacacaccgacacggcaacctcgcggtcacacgagcggcacagcggcatggcaccggcagagggcgacgcgccagaggcacgcacgcagggggacgacgcgcaggagcgtgccagtcaattgggggacgccagcaaggcgtctgagtcgcaggaaacaccggcggaggcgtctccttcgggcaacgagcgccgggtgcacttcgcgggcaacaacgacgacaaggagggcgacagcggcgaggggcacgtcgacgaggatggagatgaggtcatggagggctccaccgtgaatgtagaggccaaggagagtgatgagcggctgaacgcagattccgccgcgtcgagccatctgaacgcagtttcaatcagcttgaaacggggtttcagccacattcctcagttgtcactccaccacttctccgccgaagtcacatcaacgcgcagtaggctggatacactccactctccacagtatcagttcacgtaaatcgttccactagtcattgcagtctctccacttgtaaatcacatcttcatcagttgcgttcagacacatctgcgttcaggtacagctgcgttcaggacacttgtcagcggccagcgtcactcggtcgtatttgagggtacagtcgatgtcaggggcatcgtcagtcatttttcacttggtcagcggtctgcggtcaggcatgtgccttcaaggaactctacacgcccgagcgatcgtcccgaatccgcatggcttgggccagagctcgcactctaacaccctggttgaactcatgcaggaggacatcacagtccagccgagagaccggtatccattctggttcgtcacgccccttccacttgaccttgtacgctcgagtgcgttgagacatctgaatatgatcggcccagcgtagggccaagatcttctccacttcatatccagcgttcaaggtgccgggttcccaacagtctttgcagagcaaaacgtttgaacacacatgtgtcatgacggtcaaaaccttggccgcagattgcatcggcgctgagtcaaagtctgaacgcactccatccagatcggcgtccaaagtcctcgtacgcacttcagcttcattcagcgtccagggaggtttcttcaccagctcgggtattcgcgacacaagttgcaggtacaaacgttcctcagcgtcttcaacctgccacgacttacccaacgctagagtcttcgacgtcaggtagtcagcagcctgattgtaaaggcgcttgacatgcaccagctgcacagtcttgaacttcgtccagatgacttcatattcagctagcctgcgctgaaggttgggttggttgcagtttatcaagccttgaacccgctgaatcacgatccttgaatcaccaactgcgaccaggtcctcaactcctcgttcagatgccattttcaacccattcagcagtccatggtactcagcgtcatttacagtcacatcttccaggatgaacccacgtgcgtccaggacttcccagtcgggtagctgccacagaacacatctgcagcttccaacacgcgttgaagtcttcgccgcaccatcgaagctgagtacaacaccctgatagtctgattcaagcatctcgatgctgaccgcaggtgatttcttgacgcatcccttggctgcaaccagctcttcgatgcctgcatccgaatgctcacctgacccacagggttcctccaatatggccgtagtgtcaaccgcatctgcgttcagggggtcagaccgaccagcgtcttcggaacacctgcgttcaaggtgtgcggcgtgggtgacgtctcctacaggcgttacggctgcagcaacactcgctgcgtgcgcaacgagggctgagaacttgaacgctaggttgttcagcctgaaccgggtctgtttgaactccggcatccctagtccttgaatcagctgcgttcaagattcgctcctgaggaggttcctcggtgaaggtaacccgtaacggtttcggcctcttgttcacctgcacgagccgaacttgagcggtacctgaagttggtcgcaacatgatcttggacggccacgggttactgcaagcctgaacgcaggttggatcctgacgattcattatttcagccagtcgtttagcgcgcatctgggcttgatcagacagagtggtctcgagaatgagttgttgccactcttgatactgtcttttgcctgaacgcacaaagcgaccagcacgaggaaaacattcatactccacaattctagacaccggggtctgcgtgtctatccaaaccggcttgtcggagatgtccacaaccttgatcgcagtcggccaagacttggccgcataaatgatctttgtcacccatcggtctccgcgtccagcccacacaacctcgcgctgagggaaagattcgccatagtcaatacgcacaatagcacttcgtcctggtttcaggaacaacatctccgctggccgcaccggaaggtccaaacccattcgactgcggtcaggctcaccgcacatctgaatcgtctcttcgtccggaagctgaatcaagccttctcgagtcgacaatcgcacaccggcgctgaacatgaagttcataccaagtaaaacatccacgccgtcaccaatgttggcgacccaaagccggaaaacgtagacaactctaggtccgaacgtgatcatgacctcagcatgcgctgaaatgtaggtcggagcacctcccaaccctgaaaccttcatctgtttgtgtggtcggagcttgagctttaaccttcccgcaaagtcgaagctcagcatgcttacggatgcaccagtatccaggacgatctttgttcggcagtcattcacagcaccatgcaccatagcaagttcatgcgcatcctcaggttcatgatcatcccaccagtcacagctttcacccggccgaagtcgaaactcaaacggggtttctgcgtccagacgctcattgtcagaacgcacatcgtctgaacgcaggtttgctgaatcgggagattaaccttgggacacggccatgcaatgtcggtcagcttggtcgattcttctccttctcagctccgggccgacgtatgctagggcacataacgcgaaggttttcctcaacccactacgttctgccagcgggctggactcagagccatcgccaccactctgaaacgcgttcagggtttggtcgttgagtccaccttggcgcatcaacttctttattgcatggacaacgctccaatcttcgcacgagaatccacgatggaactggtcgcagccagtacatgggatggcgcggcaggcttcagtcgggtgaacttgttggtgacagcgatcacagatcagttctgcccagccgttctccttcgagtgtccgatccttccacagctctcgcaagtcctctgcaacggcgaattgcttgaacgcggtgacattgaccttgaacgcaggtccgggttgcctggacgcagatccacatttccaaactgaggtggagggcgccatccttcggcacccaaaacacggtaaatcttcttcgtgacgttcccaccttgaacacgggttgcgtttcagctggcacaggttcactcagattcttctcacgtcccttggcgagcgccacttgagcggccggcttgacttcatcatccagctcttcaaaccggacacgccgttcaggctcggagtctgaatcaggttctgaaccttgagcgacaaaagcgcgtccaggcctttgagccttgaaacggccttgcgggtcgttgtcagcgcggaagtcacgccgtggcgggggagtgtcatagccttcctcgcgccagatgtcctcgtggcgtcacaacgcatgttcgacttcgctgatactcttgaacttctgtccctgcagcgcggtcttcagctgggtatccttcagcttcttgatgaaacgacgaaggtgtcgctcccgatgcttggatgacttctggaactcaatcccagccttgaccgcagctgcgttcagccggtagaagaacttgcgtggagtctcgcctgaacgcactttcatggtgaactagcgctcagagtagggaccagtcgtacggcagtacacgaccttgaaccgacgagacagcttcttccagttgtgcctggtggactttggcagctgagcgtaccagtccctgagcgacgaagacattcgtccccgaagctggcgaatcttcatcttgtccggacaggaaccctgagcagccatgtcggtgaacttctcccaccaaccaacgcgatcttccacggacgcatcctcgctgaacttctcaaccgcattgtagttgatgtacggtcgatacgtccaaacggtcgtgccttccttggtcgtcgtcgaggtagtcaggtccaggtcgaagtcgtcgctggaactggtgctgtagtcacaggagcttgaatcgtcatcgctggagtccgatgagctggagtcggagtcgtctgggtcagaagacggcgggtctgcgtcttccttgctacccttccgggaagaggatcttctggacgcagatttcttggccgcacttttcttggctgcagatgacgctgaacccttggccgcagattccgacttggatgcagagctcttcgacgccgtcacggtcttcgtcccttgggaacttccagcagtttccttcttcggcagactcgtacccacggtcgcacgtagctgggcagcaccgactttggtcgtgttctttgagtgcacataaccggtacctggtgccacgccatcattgattgcaccactggatacttgattcaaggttgtcgattgagggacagccgacatttcagctttgattccggttgcgggatgaggggccgttgctgcgcgaacggcttgaacctgggaaagggttgcacgcagttcgcggttctggtcggccaggaacttctggcggttcagcgcagtgtcgcgttcaagctcccgttccgcacgttctcgctcccgctcgaagagtacgttctgaatcgtctgctgcacggtgtctaagcgcttcttcatctcaccgtcggcttcttcagcgcggcgagcgcgctccgcttcggcgctggcgctatcagcctcagcgcgttgaagcttggcctcggctgcgttcaggcgttccttccagtggcgctcaaggtcctcccgatccgcttcgtactgctgcttcgcgagcttggtcgccacttcagcgacgtctgaacgcgcgcgcaagaggtggtcttcgtgcactgccgcatagtccgcgggttcgactgggccggagtaggctgggacctcagggtgccattcagcttcacgcgatctgcattcagcctcctccagggtcctgcgttcagcctctacacgagcggcttcagcttgggcgaaggcgcgttcagcaaaagccttctccgcttgagcccgggacacttcctccttcatcgcgcggacttcgaagcttgcgttctgcagctcacgctgcatctccagccgcgcatgtccagctgcgcttgactcatctgagtcaggaacgctgcttgctgctcctgaagttggcgcatgacgttcaaggccacttgtacagctccggacgacgccgacgaagaccgaaagcctgaacgcagagatcgactggtcaggctagaccgggtcctcactgaatgatcatgacgcgagcttctggacgactggtggaggccttccgaggtcagccccgactcgctccgcgcaagttcaagtttctcctgcttgaccgcagttttcgccttggacgaccgacgcctggacgcagttctgctacttcgcgtttcagcacttgcgacctcagccatgtcgacgtcgtcctggtctggcagcgtacggcgagcagggataacagtcttggtcacgaacatgcccatgtcgggcgctgcggccaaggctccacctgcctgaacgctcatgaccaggcctggacgcatatgcgttgaagcactgtggcccagcgacatcagcgatgacgacgacgagctgtcccgagacgtctgcgtgtgaaaggaggtcgcgtacgccgagtcgttcgaagtccccgacgggccgatcaagcttggaacggagtctgagatgccactcgaagatgcgttcagggtcgaacctcgaacgctcatggctcgggcatctgcgttcagactcacgtcggtcgatgggaccagcgagtgaacagacggagtcgacacactcaacggacgagctggccgatactgcgggcgcttgggatagggctcaatctccggtgaccctcgcgggctgcgaagagccaggatcccagccatccggcattgagagacgaaggcttggccaagcagttcgacttcgtagtcatccatcaatagatcatccttcacagcttgagcgtcttgtgtcttctcttccttgaacgcaggttttgtatccgaggctggaacgaccttgaacgacactccagccgtgagctgcttccactcgatgagctcgatagtcaggagttgctgaacctcttccacgattgaacgcacatatccagggttgatcttggacgcatgcgtcatgaaccagtctggaaccgcgttgacgaattcaaaaccagcttcaaagaggagattttccaacactgccgcacactcacgcgaagacatcatactcggcgggatgacaactgcggtcaggtcttgagcgatgcctaacactctgcgttcaggacgcagctcagcgatccaagccgcgtctcgattctccagagccattcgacgccgcaagtagtccgacgtagtcattatggcctcttgccaaaccgagaagtctggccgcggattcggccaagcatactccactgagggcggaacgacacgtcctgaacgcatctgctcccagcgatacacttggcgtgccacaaagttcttcgccgccgtctcatcaagctgaatcgtgtcagccgtttcagcacccgcgcccaaacttggacgcacatctgcgttcagactttgaggtgctggaaccgggtttgaagcattgcctcgcggcaacacttcgggttcaggggcttgactctgcgacgatgacggagcctggttcgacgaactctgcggcgagcgcgaggacacctccgcgtcctcaagcgctgaacgctctttggcatccgactcctcgatctcgatcacttcagccttgaccttgaccggcacatccttgggagttttctcttcttgttccggctgcggagagtccgaaactcgatccgccgccgggggctcacccacattagcgcctccctcagacgccttcgcagactcagtcgtctgagcctgcttttccgggatgcattcagccttcgactctgaacgcaggtcttcttcttcagccgcctccgtcgacacttggtcgtcttgaacagcgggttcagtcgacgtggccttgtcttcagcctccttcgcatcccgctctgccttcctcctcgcacgcgcttcccggttgatgatatccaggtccatgtgcgattcagctggcaatccttgcgctcggcgcgactgacgcgtcgcgtcaccacgacctccgtcaccgcgccctccatccttcttgcttcgtgctcccgccatagcgacttggtcagtactttgcgaagcccaacttttcaattctcacaaaatacagacaactcggtgaaatccgaggaccccaaatccgggcacgcgcaccagctgtgacgaggtcggtgaaaccttttacgcccaggtgtatagcggtagcccagaaagggtagacgagcaaacctttttgggaaagtaaaccctgaacacagatttccttgaacgcaggttctgggaaaaatgcggccagggtggcgtggcaccttgtgaatccctatcggtgtcgtttatcttcggggagcctggatcgatcaccaggtgagttgtctgtggggttgagagccttgggttcattgagcgtaacgttcacttgtctgaacgcacttctccgaaatggctgaagctcgaagcgtgggtgaaggatcagggttactaccacaagttagaaccccagaaatacacaccactttcagacaaccaatacaaatgcagagttatacacaaacacacagccgccacttattcttagacccttgggcggtgggtagtacaccagtcaactaatctgcgatcaaggtactggtcaaccttgaacgcactttcacacgcgcaccaccctcagatgaaggaaatatacagaccaaatacaatccgatcctaaacgcagtcaatcaaactattctcgggggcgactgctaccaaaccacccgagatatcaatcgttaacatgaaatgggacaccacccttacctcaacgcaatgggcccaactgggaaatggaatacgtggatcacttcagcagccggagcagactgatccccacgtaactggacttgaatgtgtgtggggagctccgcactgctcttgtccttaaagacagcggacccgattcctcgacgacttgcgcagtagggggtaaaacgaactctctgattgttatatgctagactatcgctaggctttgtgtaaaggtatctctctcgtagcgttcttctgtgttcttctgtgttcttcgccacacgtctggcgaatgtcttgacttgagtatactagaactgttgacgtagacattctccactggattcttgcccagcttcaatgtgcccatgtctttgtgcatgactggctcttgggaaaccttggccgcatgcgaccaaggttcccttgaacccgcatccttgaaaccgggtttcagagtcagcagggctgaacgcagtgcgtccagggtctgctgccaaaggcgacttgcgtccaaggctgaaaccatactcaagaccttgcggccaagggtaggttgactcttcactgggtcgtgggacacttggcggggcttcttccgggtgaccagcggtctggacaccatgtacgcgactttactggggggctgagctccgggtacacgcattcgatgtgcgttcagagcctaggcgaggcgggacaccgtgcacgatacgttcgtgcaggcgttttcgacggcctcaatgtgtcaacccgcttaaggacgggggcggcctggacggatcgagtgcgttcagggtttctcgtctgaacgcagtcttccaggcctgaagggcccatcctaggcttgagcgcacttcgctccgcggaacatagccgaattccagctcagatcttgtcgcacggtgtacagtcgggtccgggttcagtctcggccaatcagaatggcgcgttcaggcgggtcagtagacaggtgatgaccggttgaggcaaaacctcgctcagtctcgtcacacctttagtaccgtagcccataatgcagggggtaatacaattcgttgccaatcctttgtcttgatcgtcaccagaccgaatgctttcgtcacttgttgccctcggtactcgccagcctcgagcaagcgctgcgccaacctgctcttcgcctactccgccacaatctcgtcgtcggtgagttgtagcgtcggctccgccactggccgccgcgccattccgtcccgttgttcttgtagctgctcccgctcaccgtgtccgtcttctcgttgtagtacaggggctcttcgttcattgacgccgtcattcgcggtgctcataggaatcgagtggttgctcaccgtctccatgctcgtcgtagtcgtgctcgtcttcgtcctggacagccgcagtgtgtcgcccgcgtctgtcgccgtgcccttcgtcttcttcgtggccttcgccgccgcatccgtcgtcaggggcactgtcgtcgaaaccgtgaccaccttcggccgcttcgaacgtatcgcggacttcttaccgctgacacggctcgtggtcgtgcccgtcaccgtcgctgccgcgctcgtgtcgtcatcggccaccgcggtcgtcgttccgtgcacttcgtgcgccgccgtcacgctcgtagccgcagcgttcatcaactcactgcgctgcatcggctccgatgccgtaccgcctccgtcgtaccgttcatcattacggcggtcgccgctctccataggtaccgcgaaggtcacgcgcttcctgtcgcgcgcgtggcttctgggctccgtcactgccgccgttgccgtcttctccgtggcctgcatcgtcgacgcccgtgtctccggcgtcatacttggggccattaccatacccatcgtctccggtcgccctcttcgccgatctacgccacccgggaccgccgtttccgccgtggacgcgctgctcgggtccgtcgctctcgtcgtcggcttcgattcgccgctgttcgtgcccacggcgctctcggtcgccgtcatccccactacgccgttatcgtcgtgctgcgccgcgccgtcatacacgcccgtcgtgacctgcgcgtggtgttcgcgttgccgctgctcctcagcacgccgcttcgctccgcgtgtcaatggtcgcgtcgcgctggtcgactcttcacgccgcttcgtacgtcgcttcactggctgctttaccgccgtcgccacttccgtcgtaaccacgccctgtgcattggtactcggcgtctgctgcccgggcacctcgtcgtcgtcctccgtcgtctcggcgttctcgtacgcctcgtccgtgttgtgttcatcctccgtcgccgttccgcgctcactgccgtcgctcacgccgttcttggccgactgccgctcgctgtcgccgtcctcgtggccctcttccgccgtctgccgcctcgccgtcctgttcggtgtcttcgacacctcgtgtgcggactgcaactcctcgctagccaccgtcgccgtcatctgctcgggcgccgcactcgtacctcgctcagctgccgccggacctgattcaccacccgtatccgtcgtttccgccgtcgtcgtaccgcatgctgctgatcgctccctcgaccgccggcgccgttcgattgccgccaacaacactgtagctttagcgggcgctcgcgaaagcgcgtccgccactacgttcgtacttcctgacctatagaccacttcgaaataaaactcctggagggtcaaggcccaacgatgtagcttaccggtcaggttaggactagtcatcagccacttgagcgctgaatgatctgtgacgatggtaaagcgccgtccgtagagatacgggcggaacaacttaatagcccacaccaccgccaggcattcaagctccgtgatgccgtagttcgcctccgtcgtactcgtcaccttactcgcatacgccaccggctgccagccgtggcctcgatcttgcattagacatgccccgagccccactttgctcgcgtctgtcactagtcgaaaggttagggtaaagtccggatagacaagcaaaggtttgctcgtcaaggcctccatcacgtgttcgaaagcctcctgttgcacacccgtccattcccagtcaactcccttccgcagtagtttggtcactggcgccttgatgctgccgaagcccttaatgaaccgtcgagcgaaccgcttcacctccaccgcgtccttcggctgcggaaattcgcgtaccgctgtcaccaaccgatcaagcggcctcacgccgtccgcgctcaactcgtgtcctaagtactccatgcgtttcgccgcgaacacgcacttcttcagcttcaatgtgagtcctgcttgtgagagcctctcaagcacgcaagctaactccaacacgtgtcgttcgataccacctcgtgtataagccacaatatcgtctagatagactaaacatgccgtccacgtaaggccgcgtaatacactgttcatcatccgttgaaacgtggacggagcgttcgtaagtccgaagggcatgcggtcgaactggtacagtccttgcttcgtcgtgaaagccgtcttctctttgtccctgtccgccacgcggatctgccaatagcctaccttcaaatccaaggtgctgaatagcagcgcgcctcatcgatcctcggtagcgggtacacgtcctttcgtgtgaccttatttagagcgcgataatccacacaaaaacgtacttcgtcatctttcttccgcactagcacaacagggaaaccccaggcgccttcgccttcctcaatcacaccagctgtgagcatcttccgaacatttgtttcgatcacttcgtcctctgcctgcgcctgccgtctgcgcttcagcatgatgggcgctgcatcgcccgtgtcgatgtggtgctcagtgctcagtaccgtggcgggcgggcagtcgctcttgtccgccgtcagctgcctatataccctcagcaaccgcacgatcatccgtctgctctcgtcgtcctcgatacctacgttgacctggtcctcgtcctcgagcggctcatcgctgccaccgagtccgtccaaccattcattgatcttgtcacggcgaagctcgccgctcatctgcaacagctcaacgtccttgtcgagtgggacccactgccccagttcttgccttgccggcaatcgcacttgccttccgtccgcatttaccgctggcaccaatgtcttaccatgccgcaccttcgtgaccgttgccgccaacatgaccgcgcccgtgcactgagtgggcaagaagatgcctccttcgccgtcgtcagccgccactgacaccttgaccggcgtcaccgcactgccgtccatctccgttcgccgaaccatccgtactgccgccacacgtgctccgttcgcgccatcatgcgttcggaagggaatgacgaccgcacgtccagccgtagtgtagcggatctcgttccgatcgaagtccatcatggctccgtgcccacgcatgaagtcaacgccgagtaggaattcgtcggtacagcccgacacaatgcatgcttcaacacgaatcacttcgccgaatacactgcgcatgttgaaactccatacgcctactacgtctaacaggaacccgccaataccatcaacatagtcgacaggggctgcttgctccacgcgatcaccaaactgcatccattcggtgcccgctaccgtgtagcgtgcgtcgctgtcaagcttcacgtgtcgtctcacgccggccacctccatcgttgcggttgggagcctgtcgtcggctccgacatattatacgacctcatcgcgcgcctctcgtcgtgcgtctccaccaccgcggtgctgcacgagactcactcgcgcttgctgccctcgtttgccgtcaccacgctgctcacgcatcgctcgccgctctcgaagttgctccatggcttctgtggccacttgctgccgcaccgccagctgctcgtcgctcactcgccgctcttcggtcgccttctcgcgctcacgacgtcgtttccgagccatacagaccttgactcgttcctgcttcgcccgcttgcgagctttgcgccgtgccagtcgcgccagctctacgctgtcacgtccagccaactcgtcgttcgagtccgcgctcgactcgttcgtcgccttgtcctccacgactgcctcacactcgtccgtcgagacgatcgccgttaccgcgcacgtcttggccgtgcttgtggccatcaggggtgtctccacgcccttcgtagtcgaggtctcgccaagttccgcgcccgtcttcgccatactgctcccgctgtcacacaggggcttccccacattcgtcacggccgattcctcgctgcactcgttgtcccgcctcatctagtcgctcctgccgccgtactggagcaattccatctcggcgccgtccacgccgctgtcgtcttcgttcaggggtgtctgcggggttgctgtcacgctcagcatcgtcactgccgtcgacttcgtcgtctcggctgtcgtttgggcaactgatgccgtacacgagcccgtcgccatcgtcgtagccaccaccacggtcgccgtcgactccatgccgttcgcggatgtcacacaggggcttgccttcgcctccatgctcatcgtcgcgccttctccagcttggagcgggtccgcgccttctccagcctgacgtccgtcgccagcacgtcgtactgcaccttcatctcgttgctcaggttggtggtcggcccgcacataccgtgccgccgccatcgccggtctcaccgtagctacggatcgagccgctcgccctgtatccttcaccgcagcgtccgccttcatcatccgcacgaccgctgccacgctgccgcctgacttgtccaatgcacgcgtcgccacgcacacagggtccgtcctcgttattagcctggggcgctcgccattaccgacgtgccctgccttctcctcgttcacatcgttctcatcgtccacgcttacgcaggacacggccgtcgccctggcaccactagccccgtccgtcttacgtgcaaaggtgcggttctcgcgatcccatcgttctcatcgtccacgcttgcgcaggacacggtctccaccatgtcgccacttgccccgtccgtcttacgcgtcacgcgcaaaggtgcggttctcgtcctcgttcacgtgtgcttgtcgccactggcggctcgcatcacaatcccatcgttctcgttctcatcatcgttcttctcttccgtgtcgtctgctcccgcagacgtcacgtccctcatcgtcttaccgtcggccttcctcatcgttagccccaccggttggggttttccacctcgtaccggacgctattccccctcgatagcgccctctactcgtttcccgcagccgccgctgctccttacgctcgcgcgtctgcaggtaggcgtcgttacgagccttcgcctcggggtccgtacacgttcgtgcgtagtggcccacgcgattgcacgcgtagcacttcggttggttattagggcactgcattgcccagtggccggattggccgcagtgaaagcaggcgctactcgcattgctctcggcgctcatcttaccgcccacgcgcttctgttccgtcacaacggcctcgacacgtcgcttatcgctaccagcctgcttcgcagctgctttcaacttcttcttattcggcttggcgtccgactcgtcgctgctggactcgtcttccacgcgcctgaccttcactttggccttcttcttgcccgacgatcggctgctcgtggccacagccgtcgtagacctcttccgctcggcccgtcgtggctcgtatcagtattttccattccagacatgacctggaggtggatcccaggtgcccgtagccttgttgtacacgccctgcgggttggtgaatagagccacgtgctccatctccttcctcgtcatcacgcccttggtttcgtgcgcgttgcccaacatctcggccggcaaccccatgccgccgatgcctggaatcgtctggccgctcgtccccatcatcggtatcaggtacggttgcggcgccgtagcccactgtaatccgatgttcatcattccttgtgcgacattgtcgacagggtcgtcaatctccgtggccttatccacggcctcctcgagcgtcttaggcctcggtgcctgcttcaccaacttcctcgttgtcttatcgaggcaacgataaaactgtgccaacagaactcgttcacgcacgttgttaatgcccacgacgtcgcgtagacccgctgcgaagtcggcgtacgtctcgcccggcatcatcggtcgcatccccacgcgccattcggctgctgacttatccttccgctcaccgtagcggcgaagtagcgccttcttcaaattcttccacgttcgctgtcgctcgggcagacggcgattcatgttcacccaccatctggccgcgtcctccatcaacttgtttccgaggatgtaatacagcgctttgcctgaccactggcctctcccggattccttcgcacctcgcagagcaagatcaacacgatctatccacgtggaaacagagagcttcggcgaggtagtgtacgtgggtagttccaagtccttcacactctttcgtcgttgctgtcgctcgcgttgtccgtgccgcccgcgtcgtccgtgtcgtccgtgctgccgacgtcgactaccgccgtcaccgtccgagtccccgctcgattcaccgtcgccgtcgtcttcgtcattgctcgtgtcgctaccgtcgccgccgttgctgtcgttactgtcttcgctgtcgtcggagctgctgctcgattccgacggctcatcgtcgtccggaggcatgcgggttgccctcgtactcgcgctcacgccccgtgctcgtgaccgtggagccgttctcggttgacttcaagtcccgccgctcattgccgtcggctggctctgcgccaccatcgtcgtgagctgctggacagctgctgccatcgccgctatctcaggcgacatcgtctgcacgaccaccggagctgcctccatcgtcggagtcggtactctcgccaccgtccgtgtgctagtcgctggcgtcgccgacgtgctatccgtcgtcacaccgcgtgctcttccgcgttgtgaagcacccgtcgccacagatgcagcaggctgctgcggttgtcctccgccacggtcacctgcgtcgtgcccgtgtccaccgtcgtcgcctcgcgctgcttcacgcgcctgtagtccagctaccgccgtcgtcaactgctgcagcgcgttggcgatcactgcgatatccatcgtcggtgcaggagcgtcgctgtcgccactgcgcccgccttgttcgtctgacgcctgcggcgtctgagtcggcgcctcttcacccgtctcctcgttccgggctggcactggctcctgttcggatacgggtccgggtcgtgatgctgccgtctcctcctgctcgtcgcttggggagtcctggtcaccgtcgtccgcgcccttatgcctctcatcgaagccgtcttcggtatcctcgtcgccgtccggaatggacagcttcttggccgggcgtcttggtacacgcctggacttgccggatctcgccgttttggcctgggtaggggtcaacgccgtcatggctgccttccgtgctgccgaaccacttctcaatctgctcgaatcgaccgtagtgtgcccctgtatgaccaccatgaagcgggttcgcttgtcttgcccgagccgctgggcaggtcgtatgcccacgctgcgtgtttgcacgtgagtcttctcactcttaacaccgtactggccgtcagaggtcactcgatctccccctgccggaacgtccgccgtcgcgtccgctccaattttattaagaggggtccttaaaccactcctactgctaacgaatagacactagtttacaccagcaactactctaccgtcttctccgtgctctccagcacgcttgtcagctcgtctctctccaagctggcagattctagagtgtccgggactctcggccgcccgttccccgctctgccaccgtccttcaacgtcgagtcgacgctggccctggattcaggccatgcgtgctgccgttcgtgccactcagcgatatttctgccactcgcctctcgtccagcgccgtgccttcgaggtactggacctccgtcgtgcagccgatcgctccgcagtcgccctcgtccaacatctgcggcgtgtcgccgtctgtcaccgccgtctcgctctcctcgtcgtccgtcacgttcgtcacgtccaccaccactgtcccgctcgcctgggtcctcctgccgggccctcctgttacactgctcatttttgtactatgttgtgtgctaacgatcagacgagagaactacagtagcggaacgaaggagagacgcatggtgcgctgatcttgaccttttaacttgaggatgttagctaagtgacaataatgatcctcaattcaaaaacaaaacaaacaaacaaacttttaacttgagggcttggggggggggggggtaaatacggaatgagaaatacgctaacgggccaattccttggaagtggatgcttcaacgcagggaaaaaagtcttattcaaacgaacgatgctcgtgtcactgtcgagttgagctgattggtttggcgacagacacgaggttgggcatcttcggctaagagtgattgagtattgagcaaattgacatgtaaaaaaatgtagcctgcacctagacaagtcatgttggtcattttacagctaagcttggtcgattatgacgcaaattgatacaccttcagcgaagcaatgactctcatagcgtactggagcgtccgtaaaaggggcttctaccgtaggtgcgtgtccgcatgggcacgctatctataggcgggattgcagctgagcgcgatcctgggagtagatagccagctaaaccgcaacaaattcaaattcaaactggagcgtccgtaagtgtttgaatgcaggttttggtaaataataaatgattagtatcaacctttggtaaataatgtacacaaatcttagcatttatcgacgggtacccgattccggcagatattagcttaaatattacaattaagaaagagagacccggtttggttttggaaagttaccccaataagctgcagccttgttgtcaattttgagatcgtgtgcttttgagttggtttcatccaacgctctatcgaatacttcgaagtaccgcatgcaacaaggagttagctgtaaaggtcacagagacccacgcttagtcctgaatccaaagctcggagccttatagtccagtgcgctattatgcgtgaatcgatagtaatgtactacaaaagctgcctgctcgactgcttgcagcatcacgagctgtggcgcccgttatcgcattgtctgataataatagccaaaactaggtgggttcaggcgataaccttcctggaggactctggtactttttaaggtgcctcggttgcggatttggaccaaattttggtacctgtgttgctagtctctcattgaagccgggtatcacccagcttagcagactgttactaggagcgcaaccttggatatgttcctactcccagcagggtgcagctgctacaagcagtgcaggcttgttatgaagataccgtactacatgcacttacagtaccgtgctcaaatcattgaggatattgaggagaatcatcatcgatgacattggagattgaatcacgcttcgatgagtcaaatctacaaatttctgagcgcggtgtgagtggatggacctcagtctcaccaacaatcagagtagtgtaaaccggactcggagcgagtaaacctaccgatcgtgctcacaaatcttgcgctattgagcagaagctgctcattttgcattcttcctcctgccgcccgcacctacaagaccccactgcattagcacgcatcaacggcaacctccatcttcgatagctacagtccccggtctgtgtaggggcgagccgcgccgagttccgaaatggtgcggccagtcttccagcgagcgccttctcggaccaacacggtcgacgacgtggacgagcggaacacctcgttcttgagaaacctgcagagttcgcacgcgtactcgccggagacgtcgctgcagcctgataccgacatgctcgacttgtccgaagagaataccagtggcgtacctcacacaggcgcccacagcaacagcaagccccaacgccgagttagggctccatcagacgatgtcaaggccgtggaatccccgccactgggcaaacggcgctattctgcgcgcagccaagcggaggacttaaacactttgatgcccatcattaagaagaagccgagccacttccggagccagcgtcgacgtgaacagtgccgcatcaaccagatccggtaccggatgaggcagctcaaccacgaaaaagctcggagaagtcggtgcgcgacctacaacgcgacattcccgtgctggagctgcagcgcgcccgcctccagtacggcgaccagcaggacgtctggggcgtcgtgattgagtatttcaagatgttccgcttcggtgtgttggtgccgacgacggtcaagctagagggggcacaagccggtgctctaacctctgaggcaggcccgtacaacgtcgaggtggagcagcttgccttcctacgctcgtctctggctagtgatgtcgttctgggcgaacgcagcggagtggaggcgctcatggaccagtggagatggtactcgacctacttcgacaacctgtactttcagctggagcgtatcaaacgcgtcagcgacaagtttgtgagagtgtcagccacgctgagcgtgacagtgtcagaagcaacgctggaaggtatcttcccctatctaacgtccgagcccctcaagtcgaagctactacgccagactctccgcctcccgtgtgttgtgtgcttcgagtgggatgcggtcaacaactgcgtggcacgtctggagacgacagtggacttcatcaacccgctgacaaagctgctggggaatctcacggacgtggcggcggtactggagctcgcgcatatctcgcgtgacggagttgtcggaagaccgggacaaatggcccagctgcaggacaaggaagctcagcgtagagcgacaggaggagcgcgcactcaataaggaagaacgtaaatggatgcacacatacattatcaagtcgccttctcgtgcctcaggctcttgttctgtaccccacgattcatgggccatacaagatagagagtgtgactgcggtgacttggccctagtaatcgcttggcttttgtcagcccgactgaggcaccccgatgataaacatttggcatgctcaagaacagcgactggattgtgcagaaccaacgtgataatcacttggctctcattggtacgtgtacatgtgtactgtactcagtacaacagcgagatcagaagagttctgccacgagcacgttatacggccgtggtcgaatggaccaataaccgagcgtcttaacgtcgcacaggcttcgccagagatctgctgtttgactcgctcggcgcccgatcaccggcggtgactcgcttgatatcattccgcaacgcgcttcgtccagctcaactcgaccgactcttcaagccaactcgtccgattacaatggccacaagctccctgtacccgcccaacagtcagtccctcagtgacgggattatcagtgccgtcgtacagcgcgccggaattgtgcgcgagcgcatcagccccaacagtctacatggcgcgagtacaaacaacacccacgctgctggcctccgcccaccgcttgagtctccctatccagtggacgttctgtccgaccgcaagcgtcgtcactctccttttaccgccgcaacagagaacaagccgaagagaatccgccccacggtctctctcgacgactttaagaagcacgaagacctgatcaaacagctcctgtccaggcaagacctgcgtcgcgagcgctgccgaaccaaccaggatcacttccgaaagaagcagcaaaactacctggttgacctcgaatccaccatcgagcggctgaaaggagaggtggagaagctcgagcagcagcgccacattgtttccttcggcatcccgaccagggagaccgtctggaacattgcggccgagtacttccgcctcttccgccacgggtacatcgcccccatgaaggtctcggaggcgcagtcggacgctacaacggcgcgtagtcgtcagtcacacgtgcagcttgagttcttgcgctcagcaatgtctattaacgtgacggacggtgttgttcgtggcgtggaggcgattctggagaactggaggctgttcacccagtatcacgatgacatgcaactgcagctcgagcgcctggagaagggaccaggagactcggtgctcgccaccatgacgatggatatcaccatgacggagaacacgctgcgccacgcgtacccgcacttgctggcgtccgaaagcaccacactcgcagctcgtatgctcgatgagcgccttgttgtgaagggctcgatccggttcggctgggaccacggcagtggtcgcgtcacgagcttggagacgaagatggacatgctgacgccaatgcttcgactgctcggcagcctggaggacgtagcgcgcgtcttcgaagacgcacgggtcacgcctgacggaaagctggctgaaagtagatccgcgtagacaacgatccatttaaatacatacatgaatgcagtgttaacttctccctaagtcatttcttttaaatcaagcgtgttcaggttggaaattgttcacaggcggaagtggcaagtagattcgcgaaatcgtagagctgcttcaatttattgatgggaatctgctttggcaacatcacgagcgaaatggtaaaaattgcattcaaatctgtatctcaccgattaaacaggccggtgtgatgcgggcctctcctagcacgtagctaacgtcttcaagactgccgagcgctcgaagcagcggcgacaagaagtcaatcgcggtatccaggcgagttacgcgtcctgtcgagtcgtcccacatgaagcgcacagtgcacggacactccagtcgctctctgagtaggcgagcgtacaacggagaagcacggccgaggtcttcactgtgagactgagagccttctagcgctagcagatgtgggaacacatatcgtagcgtcgcttccgtgatggtaagactgagtgtggccgttgcgacgacgttcccgagcggctgctgctccaatcgcttcagcttcaagtgcaggctaccgaagcaggacgagtagcgcttccactgctcaataagggcatcaacccccgcgagctctccaactcccacgtcatccgccatggctgccctcaagaagaactcctggtcgtggggctcagcgtcggacgacgacgcagcagcaacattgggatccatcccgcagaacggcatgaggaagccgtagcgcaggaggcggaagtattcgaccacgacattccagacgttgtgtttggtctgcgtggtctgcgctccgtagcgcaaggtatggcgccgcgtagtgagtccctggatctcctgctccaggtgctgcacgctctgctcgagctcgcgaacgatgcctcgctgtctgtcgcggtagcgcgcttggttgttcctgcactgctcgcggcgtcgctccgtcttcaggcggatgcgtttgcgcttgggtttgggcggtgcggggctgagcgtcttcggtgctggagggtccgctccggaaggaggcgtggaggacttggcggctgccataagctgggtgagaggcacgagagctgacataagctcggactgggcgtctacagtctcgcgcttgcgggtgaagacggaggcgaggcgtcttggcgacgcgtattcttgctgtcgcggtgggagcagagcggggaggcgcgtggcgttgagggggttttcaccgctgacgaagtcgcgattggattcaaaggcggccatgagtaccagttggcagtctggtggctaaatctgggagcgcgcggtgctgcgaggaaatcgaggagtggaaaggggccaacagagcaacaggttatccatccggtccgccagcacgataacccctagaaacgtgtatcgagaacaggagggtaatcaacattttgtgcatttgtttactcgccaaaaccaaacacctactactaataggtaaagggtacctggagactcgtcgtcgttggctgggaacatttgtgtctaactgaaagccattgcgacggactccgttggtggcgtaagtgggttgcagcctttgtcatgattgcgtggcaaaaatcggttgacgcaggctggccctgccctgcacaagttaagggtctacgggaatgtgacgaagtagtgtacagtaatctgcttcctcagcgaacacctgatacgtataagacacctcaggtttatatattatgaaaggattgtgttaacagccctaacgatcaaatgtactgacttagccactgtagtacggagtaaacgcagcctggccgcagtcaactctcgtaaacctcgtaaagtgcagcttgtttcccaaatgcggtcactgacttgcttcgagagtccccagtggagacgaaatcactgcgagacagagcttcacgtgtatctacctcgcggagatctgtagctcttacagcttcgttacatgtaggtagccgcgctgggaccatcggtctccttgcacgttgactcgaccactgtatcgttcccgcgcatccttgaagttaggcccgaatatcttcccgcttcacaagagctgattggtggaatcgtaatttacaggtccagtgggactccacacgttcactaaaacaatatatcgcactaagtgtggtacaattcgggaaacatgctttctcaaaaagtataaggttctacctgttcgcttgtcacgagtggaatcgtctaggaacggacaagcgtgcttctacaggctacaatgctactagggcgaggagcggcgggtcatgggccgggtcgccgtgaagctaaagacccggaagctgctactgggaggtacctcggagggaaagagggtttcgtggcatcgtggctggatttcggggacggatggcatggtgggcagcttctagggtcgcccgagtgaacggttcaagtcatcagagagggtgagcgggagatgagcggcacgaaggcgctgaaacgcaaggatctgcagaggtagagaggaagagttaggagtagaaggaaggtcagtcgtggattttgcttaaaaggaccacacaggtcgtaaggaacacttattgcattttgcttagtgatctccttgctatttgtgatccataaacctataagcacaggcagcacttactactccaatacagcggcggccggccccaaacctgtccgacaaagcgactcgcgacacgctgagcaagcagattactgtaccggtatgtacacatatcggcggaagtgtattgctcacggtgacatccagccattctgcaccgtaaacgctcggctgtacagtacatgtttgagagaccggtggtcacagacacagggccaaaagacggggttggattgaaaagtgttgttgctaatgtactccgcaaacatgttagtgattttcacaacacgcttacttatagttagtgctgtttgcaaacgcgtttggatgtttgctgctgtatcactacatgtagcagatcaaatcaatggctagtgttacctgttgtcgagaggtcgtccttaatattgagtacatttcgcggcctttcgagtaatgagtaatgtgctcggacttccgagtacgtaagcttcatttaatttcgtgcgctgcgtcaacttgaaactattgactaaactctaaggacgttgcttgttgggatgtcattcacgaactcaaataacgtgcttcaaaccctctagggcaactaatttttagttttctgctatatgacgcttgaattctctattagctcactcacgtccgcataagtggatcgatgcattactttccgagacattgtatccgcctccggtttggtccaagttggcgatgccggacgtggtatctttcctgagtggaattactcagaagtcagtgaaatgtactcacagttaagtagcacctggtgtcgagtccacaatatgtacgcgcaacggcgcagccagggtaatctagtgcaccttaatcgattgaagagatcaaggttggtgtaaagaaaaagaccttcaactctttttcgttcaagataaatagttacaaatggtctaactccacacacatgtaagccagattcacaacacactaacaaacagtttgcaacattagtgttagctacacagtcagtgtttgtgcgaacgctagtaaagcagcaattagtaggtggcgaagctacgctgattggtctcacttggcttgctcctctgctcagtatggcgtctgcgcggcgaagtacttctggatgaactcaatcttgtcggcttcggcgatgtccatgacctcttgggtcacgtctaggtgcatggtcgtgttgctgatggtgaccgaagccggccagtacgtgaggttgcctccgttcggattgaggttcttgacgaagttggcccagtacgacgacatcacgtcggcaatcgcgtagtcgtccgcctcccaaacgagcccgtgtcgtacaagttgtcgaagcagtagttgatctccgacatgtggtacgcgcccgcagtctgtccaggtggggcatggctccagtagtacgtgtagaacgggctcgacgccgtctccgcccagtagttcccgaacagccagctaccgacacgcgagatgtcgcgggcagcgttgttggtcatgttgtcggcctcttcatcggtgctcgtagggtagagcgccatgtattcgtccaccaaatctccgtacttggttgtggctgtagcgatatactcagccacagtcacgttcgtggtggtggcagcaccgctctcgtcagcgttgtttcccgttatcagcgcaacatcattggcaggaccctgcagcgcctcccagtacgtctgaggcataacgtagccgtccaggacggggcggaagagaggaggttcactgctagcgtcagtgtcggcagtggtgccgtactcgtcgttatcgtcgttgccctccaagatggactcgatactcaggttgcggagctcagcggccgtggacacgttgtggtcagccatgtatgtgaccccgccatcgagtgcgtgctccaatgtgcgataggaagttgcaagagccccgattagcgggtcgtacgggaagcggatgccgctcgccgcgatagcgccgccgaacagcccggccgctaagggcgaatcgacaaggtgatacacagaagaagccccagccgactgccccccgatcgtcaccttgatcgggtcgcctccgaacgcagcaatgttctcctgtacccacttaagcgcctggatctggtccagcagaccgtaattgcctgtggagttgttgggcgactcgcgctgtagctcgggcgtggcgaggaagcccagagctcccatccggtagttgagcgtgaccactacgagccccttggccgccaagccagcgccgtcgtagagcggcagggatccagcgccgccgatgaatcgaccgccgtagatccacacatagatgagaagcgcgtcgtccacggtatccgcagacgtccacacgttcaggttaaggcagtcttcgctcattgtatcactgctcacgccggactgggggcacaccaaaccgaaagtgtccgccaccttcactccgtcccaagacgcagggggttgaggtgcagtccagcgagcctcgccagcagtagaagcggcgaacggaatgcccttgaacacggtgacaccagcgacgttcgtgtcttcgacgccttggagttggccgtaggtcgtggtgacaatggtcgagttgccaaggtcgtcgacagcatagtgggcggagcagagccccagcaacaacagtgctgccgcggtgcgcatgctggatacgtgggggttcgtgacaacggagcaaattgcagaatgagactggggaggggagacgagcccgtctgcaaggactcctagccaaggagagacacacgcctttggcgtttactgctagcagcggaccccgccgggggaaggcgcacgcagcatggtgcaatctgctccaccccacctagcaagaatgaaaaagatgccacgatccttgcgactgtctaaacgagcaccactgctgcgatttgtccactgcaacatgtcgcggatcgctagagctccgatgctagcttgctttcccattcattacctctaagttgaagcagcccacaccaaaatccagtgcgcgactgatcgaatgcaagagtcgcatcatcaaagacgagcgcgggcttacgcactctatcacgacacgaaaaggttatcatggacaatcaatcagcattcaacaggggggggtgtacagatcattagcgcccactgtgtcgctgtacttcaattgacagcggggagaacatgtacttccccccgggcgcaaaggcttagtaactcccagcagcaagagtggcctcagcgctcagagatcggcagtgcatgaaaaggtggcacgttgccggcaattctgacctgtaaaaagtaaccatgccacgggctacagagctattgtatcagccagatagagtttggcatcttcgctgtggtggtagatacaacaggttcacaacacagcggtgcagtacatgcatgatttcttgttatctattatccatcgcgcctaccgcaagacgtagtgcgatgtctagactatcctaatgtaaatcaatgtaagaatatgcacggatcagtgtccctaacttctccatcgacgcatgcctcatacctaccgcatgcggtggtgtgaggattcagtcgtgtgagtacccgaaacgtatagagccacaggatcctcgtgctgcagttgctgttctcgttctccgtgccatgcgtctgcgcggtgtcttaatcgttcagtatgctctcgaatcaacgtatccaaacgtagcagcgttcgggtatgatcccgtcgtctggatcggatggtgtcgtttacctcggtaagcagcacaccctcgcccgagctctgtattgcggctgcattcttcatacaggttaaattccagtaggcacggatcgttgcccagatagcactcaaaactgctgcgtgtagccgcattgccctgtgccgtgtgcacatgagcgcttctgcccatctcatagttgatggtgttgccgatggccaagggtgctgtgtatagatccggaaattcggtttggagccatcgtctggctgcgataaggttctcatctcttcccattgttgctgtcgctggtagccatgagatgatggactggcgagggccaaaaccacgaggtacttccccgaggtgagtgatcgttagccaggaggaatttactccatgttggaacccccgggcccattcggaagcaaaccggtggtaattttcgtgcgagatgtttggcatcgcgactcctatccaaatcgtatgagggttttggtagccatgagctctctgtggcggagctgtgatatttgccgaaccatgcgttcagtgcgcattttcaggacctttgcaggaattcgtacgaaccacgtcgttgtcagcctcatggcgactgcgaatccagtagaaccttcatagcaagcgactcataacgtccaattggtgctttgtggcagtcggagatcttgtttgtttgttttgtttttgaattgaggatcattattgtcacttagctaatacgatcgctaacgcctactaaagaccgggggcctcacctgtgcaaagcgtcactagggagggggctctctggaccagcgtctggtgggagagtctgcaaatcagtgcaaagcacgacctcaagcgaggtcaggtggttcgtactcgccacccacgaggtcggcagatacaggacaagggtcctgcacctcctgttgtgcggccgtcggccgctgtcccatggagacttgacttgagcgttgatcgcgttcgcccggcgcgtgctgaaggatgcgtgagcctagggtctaacaacatcggatgacggcagcatcccgaaggacaccgcacaaatgcctccgtggaggcgtggcttgagtgcttgaaccgcggtcgcctgccgcgagcttgaaagagtggtcgaaggctgggcctcccaccaccgtggcaacgacccatagagtcgccgccctcttggagcgcaatcgccgtcgtcgcgcgcgagcttctcctgtgccgactccggtcgtcggccatgggcacgcgcaagccgtcgctgcagccgccatgctccttcctgggctccctatggaggattccccccaggaaggtcaagagcccggagatccttggaggcgacccttggctgacacttgctcgcgacccgtcaaattctggaatggcagtcggagatcttgcagagtcgtctcccaccactgcgtcgactccggcaaaaatatatcatcgatccaccacgcgcaattcgctccgtccggatgtctacaacggagggctgtcggtgcacatgggtagctagcgtgcaacacaccaacagaccacaattcggactgctggctggggtgatactggtagtgagctacttcaggtgtgaacgccttcacaataccttgaatgaaaaaaggtagaagtcgtcctgtgagtcgccgggcggtccgctaggcctccatatgaaagaggtggctagcatattgggtccattgccagtcttggaccaaccacggtatgtctggcatggacccacaagttcccggctagttctaccatcggtgttcactgagaccgcatagagaggccggagacccaccaggctctcgtgggacgtccactcgatctcgccaattcatggctacgtcctgggatatatccctcttgatctggcatccatagtcggcaacagacttcttccagggccacgctgcattcttcataaactgacagaaccgctgaacatggtactgacccaattccgaagcggtggccctgcgtatctcggatttctgggcaaaggcgacagtgcggtaaccattgtcgataaagggtgtgctttcgcgcgtttgtatgcagcacgtacgctattgttctccagtaaaaacgccgttgttggtcatcccagcgcagggtgtccggtgtggtaagcgtactttcacatgcagtactccatgctcccgctgtttgttcatccatgctcgttttcggcactctctgcgaggaacccctgcacaattcctagtactgttttgttgtcatcgtcgagtgtggtcagccttcctccgcccctgcagtgcagcaaattggtggggcgtgccaggttgtattgatggctccattgcactagataaacacgagaagtaacgttagttcgctctcataccataggtacagtaacctcgtcaggaatgcttaagacacttgtggagtctgcaagaatctaggacgtaccggtacgtggcttagttaacgttagtagttcccatctcaataattaaagctaacgcataccgatttggtcattttctcgaaaaataaaaaacacttttttgcttgaaaaccgtcccacaaaaagtgtgtttgtatttcagccaatcccaacgtcatgtgtatttcataaagtatctcgatgccgattggtctaatattgcgagacccgccaccaaacgccccagcagtagccatggcccgcagcccgtcgcgctcccgctcgcgttcgcgctccagacgccaccgcagccgccgacgcgcacgcagcgcttcttcctcctcggcctcttcctcctcctcttcttcttcgtcctccagatcccggtcccgcgcgcgctcgacgccgtcgccgtcgccgccgccccgcaagaagccgcgccgccgagaccaagatgacgcagacgccacgccgccgcgacgccccgcgcgcgacgtatcaggcggcgtcacacctccgcgtcgccgtgatgacgcgccgggcgacgtcacgcccccgcgcaagctgaagcaggaggacaagcaggaggacaaagcgccagaggacagtaaaaacaataagacgcccgtccgcagcaggaggaccctcctaccggacgtgcggtccactggccgcacgggcggcgtctacattccgccgtttaagctcgcgcagctgcgcgcgcagcaggaggaggaccagggcccgtcctccgaggcgctgcagcgccgcacatgggacgcgctgcgcaagagcctcaacggcctcatcaacaaggtgaacgtggccaacctgagcaacatcttgcccgagctcttccaggagaacctcgtgcgcgcgcgcgggctgctggcgcgcgccatcatgaaggcgcagctggcgtcgccgggcttcacgcacatctacgcggcgctcgtggccgtgatcaacaccaagatgcccgagaacggcgagctgctggtcaagcgcgtggtcttccgcttccgccgcgccttcaagagaggcgacaaggtcgtggccatcgcgctcgtgcgcttcatcgcgcacctcgtcaaccagcaggtggtgcacgagctgctggcgctcgaggtgctgacgctgctgctggccaacccgacggacgactcggttgaggtggcggtcaacttcacgaaggagtgcggccagatcctggccgagctctgtcccgagggcctacgcgccatcttcgagagattccgcggcatcctgcacgaaggcgagatcgacaagcgtgtgcagtacaccattgaggggctgttcgccatccgcaaaggcggcttcgcggactacccggccgtgcatgagcagctggacctggtggagtcgggcgaccagatcacgcacgagacgacgctggaggacaagatcgactgcgaggacaagctggacgtgttccgcttcgacccagactacgagaagaacgagcagatgtggagcgccatcaagaaggagatcttaggtgagtccgactcggactcggattcgtccagtggcagcgatgacgacggagacgacgacgatgacgaagatgaatcagagcagcccgtgcagacagacaacaacgtggccatccaggactacacagagcaggaccttgtgaatctgcggcgtacgatctacctgacgatcatgtccagtatcacgcacgaggagtgcgcgcacaagctgatgaaactcaacatccgccccggacaggagaaggagatctgctcgatgctgattgagtgttgcagtcaggagcggacgtacttgcggtactacggactgctcagcgagcggttttgtctcatcaagcgcgagtaccaggacgccttcgacgagtgcttcgctgagcagtactcgctgatccatcgtcttgagaccaacaagcttcgcaacgtggcaaagctattcgcacacttgctattcacggacgcgctgccgtggaccgtgttcgagtacatccgtttgaacgaggaggagacgacgtcgtcgagccgtatcttcatcaagatcctgtgccaggagctctcggagcacctcggcatgaagacactgaaggagcggttcctggacgagatcatgcagccgacgttcggcggcctgttcccgaaggacaacccgcggaacactcgcttcgctatcaacttcttcacatccatcggtctcggtggtctgacgacggatttgcgcgagcacctgaagaacgcacccaagatgattatggagcaggccaaggctgcggcagacagtagcgactccgattccgactctgattccgactcgagcgacagcgacagcagcagcagtgatagctcatcagactcgggctcggattcagattccagcagcagcgactccgattccgactaattcgatgtaacggcgctgccaggtgagactgcaggaccacaaaactactagtgcaaacagaacagctctaacatgccgtttcaaacgagttctctcttgcagcctgatgcgaacgccagggctgctaaaaatactgcgaacctgggtgcccagccctgagcttcctgtgctgtctccattacacgtttctctgctgtttgtccccgcttcgcgtgcttgatgaagatgctggcgtcttcggttgacaggaggatagccgccccgccggtatcgatcgggtgtctagcttgccacggccagtatttcgcagcgtcgctacccattcaccagaagacttgtttccagcgcaatcctgacgtgttggtgccttgtgagaagtgcaagagctgcatccggtacgttctccttactgttgcgtgtgtgtggtgctgcccctgaccttcggaactaaaacgctgttgatgcactctacttgtagggctaatgattttcatgttcacatcgcctcgtgctcgggaaagcctgtgtcatccgacaacaacggattcacgcagcacagcaccctgttccagcgggcttcgatggatttgaacctccccgaggctgatggacgtgtgcgatgcaaactttgcgagcgagctttctcgcaggatcgaatttccaagcaccagtcagtctgccacggcaagcccagatccgaatccgaacgtaggaaggatgtcccagttgtccagcgccacgcactgagcagacctcctgtgacacaaccgacaaagcatcgaaagaccatccgcgtccagtgtaccctagcgtcccggacacgggaagtgtcgtttgactttgttcaagcgaaacacgcaccagcaacttgtaattggccatcgcagggcacctcaggacgacagtcttgccaatacccgggagcgcaggcgatacaaagtggaggttgtgacacctccaacgctagctcggccagcaacccgctggctacgaatccgttaatgacgatgccgagatgaaagagaataacacatcaattacagttatgtactacgacatgcaaaccacatgaagcagagctcgctgcagcttatcacaccacctccatgagcattgccacgcctgcgagcacccacttagcaggcggcaccttggtccgcagaggcgacatgaagatcaatgtcggtcctcgctgctgggttcggtacacggggcaatcgaacacgttcccactaccagccgcaccttgctttccccctccacctccgccacccgagccactcgaagtgtccttgcctgcagtgttgacgatggctcggcacgtgagcactggcatggagacgtacatctctcgggggagactcgtctccaagacgccattgccgaagtcccagcgcgctccttccaggtacaggccatgcacgaactgtccgtctcgcgccggggcgtccactgtgtcgatggtgcgcttcgtcacgtccgcagtgatacgcagcgagtcgagctccacgttgtgcttgcgcgctgccgtctgcagcacggctgtgaggaaagcttgcgggttgaagagtccgggcagccacagcaccagcggcaggtccggcgccgatccaatccactcctggagctgcgcgatccgctgctgcaagttggccagccacggcgcgagagatcgacgggaaggacacgctgcagccaaccagttgtccggtacgcgctcgtagtacaggaaggtttgaagcttctccatcgcctcggtaagagggacatcacctcggaacgcgagctccaattcggacagcgagtctgtcatcgtttggagcaagtggtttatgcgttgacactcttggagcagcactgtctggaacgggtccatgtcgtccgcttctgaacttgatacagatccacctttgcttcgccgtgagcctccttcacgttgtccagagtcggacgaccccttgaagaagagttcctggatatcgaagcggaagtcgcggtagttctccaaaacatcctgcagcaccccctcggctgctaactggaccgcatcggcagtctccttagcagctgagccgccaccaagccctgacgttccttcctcttcatcgtcgctgtcgttctcttgagcatcctcctccttggtggtcagcaacaacattgactgcagaagcacttgaccactttcagttcggaacgcaacctcggcgtttgggtgaaggccaaatgctgtaggcgtctcgttcagcagcgacgtgtgtacatgctccaggattcgatcgaagcctgctgaaagcttgggggccaagaagtcgcgacgctgttgccctcctccgcttgggccatctccaccatcgcctccagctccacctccgccgcctccgccatctggtccactgctgccaccgccacctccgccgcctccacttgcatcatcaccgaacggaagcatcgatagctcttctagcagatcatcacgcaggaagtactgtagatacgtagcagccacgagccggtcgagctcgttgacgatgtggccaccgtacatgatctcaccaaacaggtatcgcaggtctggccacggcacgcgcacgggggcgttgtccatgtagtttcgtaacaccgtgctgctagcgagcaagtcactggctgcgaatggatacagcatgttaaatccctgcggcccgaacttcttgcgttccagcatgagcgagtggaagtagcagagcgcaaacaagatgcagcgtgtacgaggctcgagctcgtccacgacattcttggggaagcagcagaatgcgcgcttcacattcgctcgcagccccgtgggtggctcgttcgtaagcttgatagaccgctccaagacgccaattgggatgttcgttgacgggtcgctagtgatgaacaggcggaagttagggtgcagtgttccgatgcctccaccccctgaattggccgcccctgcgggtgggagcatcgacagcgaccggcttgtccccatacggatgatatccttgctgctcgataagttactgcgtagggtagcgtaggacgccgtcttgctcatcttggccagctgctccagccacttgtccagctccagcatccacttcggcatcaggtggacgttgttgaggatgacccagtggccgttttcaaccgacatctgcagcgttcgcatcgcgacctgctcctgcccttgacccagcgcaatattgtggtagtccacgcctttgatccgttcttgatcttgcactgctagcttgtccacgtcagcgaccacgtcggatcctggtgacaaaatgaagtacatcggggtccacggggagctctccttgaacgcgctcttcaggatggcaaaactgttgagctggctgtcgcagttgaggaaattgctgccgttgggtagcgtctgcagtataaagttgcccatcgcttgggtcagtcggtctgggcgtagacacttcacagcgagaatcttcaggaacggtgctgacttatcaagctcgcgccaatccagcggcagcttctccagctctgggctcgtggaattgtaccattctcgaaagcgcggctccgattcctccagatccgacacgaatcgctcgaacgggcctaaagtgatcagcgcttgcagtgactgccactgagactcattcagccacgagatcgtgttttctggtcccacaaccttggatccttgcagtagaaaccgagcatactgcggctcgtagccgctgttggcaccgataactccacgacggagcaagaggaacaccagctgggtaaggaagagaagcttgtgctcttcaaagagccctctggttaccatggaaaagatcgtccaacgcaatgcctccttcaagatccccacccgatcatgcgcagcagcagcagcacccccatggttattatcgcccccggctgctggagctggtagcgcaacaccatccagcgctacgaagaagaaggtcatgtaggactccagcgagtagcgatacatgtggttgaccttgcagagctgactcatcaggaaatacatcatgcttgcctcgttggcaacaggccggtatacctcacgcgccaggttaatctcacgctccgcgtcttttcccttccgcaacgcaattccaacgtcaatagcggtaagcttcgtcttctccaggccttcaatcagcggaacatcggacaaaatgtcatctggagcattcgagagacgctctagcagatcattttcaagctgcaggagctgaatctggtagccattgaactcttgctggagctggcgcttctgcgtttccaagtcgggctgctccaagttcactacgttcgcaagtaattggtcctcaagccccttctccgtcacgctgaagtcgatgagcgtgcagtacgctaggatctctggtcggtagtgcgggtttggcagctttgtgtgcaggaacaagcggaagcgaggatccacttcgatctcctcggccgcgaactgtaggaaccagttgcgtcctttcttgtaaagctgccgcatgataacaggctccaaggacgcgtcaatggactcgcccaagttctccagaatgacgctttgtccactcgtaatcgcagtcttcaacgttgtcgtccagttcttttgtgctggctgcaagataaccagcgcctgggaagctgattcctgttccgcacgagcgtcgacaccctccggtttcttgtgtcggaagtcacaagcgcgtagccagatgatgccctgcagctgggggtccacaagaagcggccagcgttgacatgacgtgatgatgcatccgttctcaatcgagatgcgatcggcaggcagcccttcattcatccactgggccacgtcgctactgtcgctgagcacgtcaagtggatcaacgcctacactttcgtgtgaaggcgacgatgcagacatggaggaaggctctagggacgtttcggcgtcgacaccaagctctccattttcacttgcatccgcaccattggagccactgctgtcgctcatatcgggtgggcttccaatcgtaatcgggatctctcgagtcacgatatctggcagccaagtgttcttccagagctgagctcggaaactcgcgttgaaagctccaatatagctcacgaatccagcagcaaggagcgaatcaccgattagtgagctctcaccagcacgcaaaacatcaatttcgtgagtccaccgttcgttctcggaagccaggccgttcaccagtcgttcagccagcgatagtcgctcttggcaagcttgcgcttcggcttcaaccttggctttctcgttcgtcgcatcccggaacgaagcctgcagcgcattcagctggccttcgacttctgccactagcttttgcactgcagccagctcgctgtcagcctcggctttcgtctggcgcgctttttcaagcgtatccatcagtggcttaacacgtacataaacctggtggtacgagatgatgttgacgacccacacgcacaggttcgcggcagccacagacttgctcttcatcttttcgtagttgaagttcgggtcctcctgaatgagcggctccactcgagccacgacttccggagggatgttctccttgtcatattgctccagcgactgcttgaatacgtccaccttggccatcatcttcttggcgttgtcccagctgaagttcttggtctccttcttgaccatcatgagaactgccgctgttaccttctccacgccggctgggggcttgcccatagacttcagttccgtcaacgaagctttgttgaggcagttcacggcctgttgagctgcatccagcgccggcttggcgatcgcaagctcaacggtagcttgcgcctcaatttgcgaggcaatctcagcggcctgagcagccttggcacgctcttcgtctgcccgccgctgcttcacctcggcatctcctcgctgcttgcccatttgctccagcaacaagtcggtggctttcttccgctcttccaccttcttcatcgtcagcttcagctcgtcctgcagccctgcaacatcgagcgccgtcttcttgagcgtagccagacccacttcgagccgcttgatcttgagcgtttgagacgaccgcttctcgtccaagagcgaccggtagaagcggatgagctccaagaacgacgttggcgtcacgtagttgtgtcgtccgtaactcttggcgtacatcgtgcacgcagttgtgacggacatgtgcatctctgccatgtgatggcaaacattctcctgaatcgcgcgcgtcgacagctcaacgtcttggaggaaattcagcgacacatcgaccagcgcttcttttggccacggatggaaccagttcatggtgcaacagctgataagcgacgggaagttcctgcaacgaatacgcagatcaccgcccaccggcgaaaaagccaagatgaggtgcagatttgtacgcacgcgctcgtagaagaactcctggagctgctccttggtatctggaactccgcgagccttcgcctccattcgcaaggatccagccatcgactccatctcttcgctggcgaacaggtctgaaatgtaccccgacgttaacgcgtccgtgagcggcaccaagaaacggttgtcagtgatctgagagtccgtgagcagcagcacaatgggcttagccggtcggataccagccttgcggtagatgtcttttaggtcttctttaagctcactcatcccatacgagggaaaagcactggtcgtcagcgacaccaacgcgtacccgctgataaatgctgccaagcgagaaagagactgctttccagacccacccacgcctatcagtagcgcattgccacgagggttagccaggatgcgaacaattcgcgtaacatgctccaacgcttggtcaaacagtaccaggctcatgactggatgcgtctcgttgtactcagtcagcttcctctccatacaagcggtgatttgagtcttttccgctaccggaacgtaactgagagtgctgccgcctccatactcgacttccatggacgctgatcctgacgatgaagagcccaagaagttcacacaaatgaggggcgacgcgaagatttctgcctggtcttcctcaaagttcttcttcgtctgctcaatggccatctcagcaaaccgctgaatctcgctgggtgagctcatgcgatcactgaagacacggaagcactcgtggatccaaagacgacagaactgcagcgagttgttcaggtaagcttcgggacgggccatgaagatgccttggaacaaggagctcagctcgcgcatgctgaacacgtagtggaacttcgtcgcagtaggaaggaagttcgctcgcacctccgagtacaagtcaatcgttgccgtgatgatagaagacgccagcttcttgatcttgtctgcgaaattcgtcagatgctggttcagtagagccgagtaaattgtgctgagatcctgcttcgacggcatgctgatgcagagtgtcgaaaagtgacgatgcagacggggattaactgtaaacgaaccagccttggggttcatacaggcgaggaattggacgtcttggatcagcttcttggacgacaggtcatgccggtcgtaccacgaattgtaatccatgtactgccgcagcagcgccagcgccgtctgggtaccaaactcctcgacaaacggcatattgagatcgtccaggaagtagatgagtttgcggttgtacagcggtccatacacgcgcccggatctcttctcgaggtactgctccaaacgagattgcagctctcgagcgtccatgtagtggtgcatgctcacataggcaaaaacactatcatcctccaaccccttcatatgctcgtgaaccagcgacgacttgcccgacccgctggaaccaaccagaatcgtaggctttcgcttgcacagaagcaagtcgataatggagtgaactcgcgtagactccatggtaggaaccacgagcgcgtggaatgggacatcgcctacaggcatcagcgtaggcactttttctccccagtagaccagctcgttccgcgttacatcgtagtagaagtcaaagaggtttgcggttccactagccagcatcgccgcgctgtttgcatcagctccacctgtcggtgctgggaatgatgtagatccaccaccagttgaagcagaggcaaacttgtacttcgcgacagccttgaagtttgtcgagaacgctgcacggtcgtcagttcccttgtcgcttgctagagcacctccgaacgcccacaaaccgcagtagataaacgcgttctccaacacttcaggagttttctcgtgctcgccaatcaagctcaacaacccgtccaacaggcgacactgcatctccatgatggcaatggccaccactggaacgatcgtctccgccttcgtgtcctcaagcgccatgaacatcgagtccacatacttctggaagagcccggggagaattcctgcttcagcgatactctcacgttgctgtaaccaggattcaacggcgggataccagcctatgtgcccttcgtcgacgtatatgatgcctgctcgggacacggtggccggtgttgcgttcacgagcgacgatatctcgaacaccagtcgcatagacttggttagtggaatgcgctcattcgacacaagcgtaagaaccttgttgtcgtccatcacagtgttcatactttcaatccacacagcgtcgatgtcgccatccaggacaacccacttgtacgtctgcgactcgctgaatggtgccacactcttggacatgttgcgcataatagaggataggacgccatctctccagtcgttatccagcgtcatatagccgtacaactcgtcggctgtgatggccttcgggttcacgctctcaaacacggtcaagtgcttggtcaaagcattcccgtcgtcatcagcattgtggcaagcggcgagcgtgttccagattgtgcttttcccgcagccagccggcccgatcagcatcacgctgtgccgcaccttgaggacttcttcgaactccatcatcttcttgaggaaaccatcttccggctggagcttcttctgagcacagacgcgagcactcttggtctgtaacgtgtcgttcttcaggtgtgggagctcttggtttgggaacaaatctcgcagcaaccccatgaagaccgaatagtcaggagggaggatccgcggcgtgttaaagtctcgaaggacttgcatcagtacggtctcttccgagagtgtcgaatgcgcacgacgcaagctgccagcgactagaagcacagacttcacagagcgtagtccccagtcgtagtgcttttgcttcgatagcagctcactgcttagatcgtagagcgtgacaaacttcacggagagcgtacgcgccttcaggaagccctcagccattaacatgttctcgcaaattggctgcaagtccggtttgatcatcgcacaggaacggaacaatgccttcaagttttcaggcaactccgcacgaccagcatagcctggattcatcgtaataaagaaccccacggtcggtaccaatgcgatagttttcccgaagaactcgcaatttccagtctttggcatagcaatgggctgttgtgcgctgccttctcctccagatgagccaacgtcgctgctagcaccgcccgatggaccacgattcgtagatgctaccagtaaagtcgtcgcatccagcacagtcttcacctgcgttgctaccactgacagcacttcgaccgagattcggttaaactcgtcgaagcacccccacgcgcccgtctgagctagtccgcggaagatatttgccatcgtcaagtagttcatctgatcactgcagttaaacacgtagcactggagccccattccacgtgctaaatccttggtcgtttcagtctttccagtgcctgcaggccccgctggagctccaccgagacagagtctcaatgctgtcgttagggtgacgtagcagcggtctgtaagtggagtgatcaccaagcgcccgcagttgccagtgtactcgtagctgtaaaacgagcgaaagtcgcaaatcttgatgtgcacttccttcttctggcctgtactcgtcaggacaggcgtcgtgtagtagcgaagctgcgactgccactggaagtccagcgagctcgacactttctttgtgatcagtgactgcaccacgtcgcgcgcatggacgtcgacggtaatgagcgtgatgatcttctgtcgattcagcgctccgagttgcccctgaaccagcttgatgagctcttcaaggcgcaccgtggacacgtcgtagtatttcttgatcgcgtcctccgtgccgttttcaaactcttccagcgcactctccacctcctccgtccagacgatttgactccccagcagagccacttgcgccggataatcaaacacccatgtgtggcgagcgcaatccacaccccagagagcactggtttccacagcgtcgaagatcttctgtcgcaaagtgtcctgcattaccatcaccaggtcgttgaaccagttttcaaccgtgccgtggatcagttgcgagtccatgaactgcaccacttcaccctccttggagatcattgacatcgcaagaaaccgctcttcaagagacgtagacgacgtggtggctgacattttcctcccggacaaactccctccaaatgagcctttggcatctgaagcagactggagggtgaattcaaacgactggatgccgtcgaagcagttgccaaagtgaggctggatacgaggtgggtagttgccattcgacaaaatctcaagcagcgacgcgttcgagacgaagtaaaaccgcgggaaaatgtccttcttcccgtccaagtattggttgagagccttctggcaaatctccagctcaacctgcaagtcgtgaagcacaacttcgcggccctcacgttggcagcacgccaccagcaccgacggcgccattcttgcatctgcaaacagctccttcatttcctggtcgacgtgctcaaatcgctggtattcggatggcaactggcgttgaatatcaccagcggaactcaggaaaatggactccaagctgcaccattgtcgctgaagcgtgatccacagtttcaagatagtgtccacattgcccagctgcaactgccattcgaagaccttgtctttgaagtaggcaacaaactttccggtggcagccatcgtttgcagttgtagctggtgttcttccaggcactcgataatgacgttcggcatcttcagaatcataatgtcgccctcgatttcctcgcccgatgccactggtaaggcgctcgagcttgcagttccatgtggatggtcgtcgttgccctcgacagataccgctgagccgcgatgatcgcgagatttatcagtaccagacgaggctttacttcctgcagtttgatatgggacaaattcgagctggaagccgttccacgtcgtttcaatggactggagctgctgctcgatcttgaactccctcgacgccatttccacgagctcattaatctcgttaacgaagcgaaagagctccaatttgagcacctcttcaaacctcagcgagcttttcccgccactgctgctgtctccagcccccgagcttccactggcagcggttcccatcgttgcgtagcttgaaggactcaagccgccagttccggacaaatcaaagtgtttcctggcgagcaccattaggctcttccagtgtcggtctcgcatggctggggagtggagatgcttgacaaggggcaagatcaccgtcatctggtgcaacttctgctcgaggtagtcgtatatgggccaatccttcacggatcgagcaggtgagaacagcgcatatcggtgacgctcgatctcgtcaacttcttccatcagagcatccgcatcgaggtcgctccataatagcggctgccatttgttcacataaatcgagtccaagagtgcaacgaaatcccaaatgtgcttgagcgtcgtgaagttggcacgcagcatcgtcaacacgtcgtatttactggaggctagctcgaatatgtcttcaagctccattagccgcgcagcttcctgctcaacctgggatagcttcgcgttgtaggcgtccagctgatcgtacacgtctgctaccgagcggctatcggagggggcatgcaatggagcagcaaccttgaactcctctttcatcagcgtgaggcgccgattaaactctcccacttcttgcttgatcgactccaccatttgattctgcagcggttggatcacttctttcttcttgaacgtcttgttgaccatattctcccaccggattggcgcttgctccaggaacatcagcacgttctctttgccgacgtacgacatatccagagcgattccattcagctttaacaacgccacaaaatcctttagaggcgcaaagttcaccagcaagtcttcacgcatcaagcgccgcacgtccctgatgtgcagcatacactgcatcaatgacggcttctccttttctgcattcgcgctgtcgatctcgatgtccagtcccgcgtttactttctgcatgaagttatccacccacacgagctggttgacgactcggtcgtgtaagtactgcgtgaataagtagacccacttcgtcacccacgtcgataaagcctgtttgatcggaagcgagttgacacggacaaagcccacgtctttcacatgcttcgactcggaaatctcgttctgcagaccgaggaagaagctgatcttttcttgaaatcgctcaagattgagaagctgcgcaggcatcggaggcggcgtggccatcgcagagcctgcagaaatggccgacttggcagcactcctctcggtcactaggccggacttcagtgtcgatgacggcaagctatctgcatacacgattcggccacgagagccttgttcatctgtgtacggatatggagaccacgcggttgaaagaaactcctgaaacatctgcggcaagtccgtcgtccatagatactcgtatttcgtgagcgcatgacggaaggcactgcaagccttttgattctggtcaagaaatgaccaaatgtcggcaataagtagttgaatctgcacgttttctcgcatctctttcagataggagccttcagagctgtccagtcgcttgaagacagtggagcaatgcagaatcgcctccaaccgccgcataatcaggtcctccacaccgtttttcgcggcggtactctggatgggcgggaagtacacaatgtctttgccgtacagatccagttcaacttcgagcaaggctgggatgtcttcactttcaattcgcttcggatccaactgctctcgcagctgaccaagcgactggataattactcgagcaagaccgtcctccacgataccgctaacgtagtccacgtaagctctccaatcgggactgccttgagccacgcgtaaatgcttcaacgactccttgagcaaacggtgaatctcattgcctccttccttgatcacatggtatttctgctggcacaagctcttctggtgctcctcgaactcttcaacggacaatgccttgctcttccgctcaaatagaagcggcgacgcattccaaatatcgagcagctcgtcaacccggttctggtgggtctttagctgactcagcagcgtgttggcctcgttcaccacagtcatggattctttcaaaaacacgtcgataccatgcgacttccagttcagagcctttatgcccttgttcaacacttgatccatgcgctcgaggtaccctttcacaagaggccgctcgacaggcaacagggtcgagtggatcgtattgtacatgtccacaatgagttccagattgccagtctgccgccggaacacctccgcacgcttgtatatctccagcgcgtcctcaggaatatccaaaccaagcagcaggaaatattttacttcacggagcaattgcactaatgcagcatcaaaattgacgaatagaagccccacgctggactgaggtgctccagccggttgctgctgctgttgccccttgctccctgaacttgtagatgaatcaacgccatttgatccaggagcaggctcacgccgtatcaacgggagcttgagcttggccttcgaggaagtttcgattgaaataccccattgtttgacgttttgaacctcgtattcttggagcatggccatcacgttcgtgtacaacttcatggcttcttttgaatcttctcgctctaggacaatcctaggtgaaatctgcttcagtttctccatggggaatcgaatccgctctcctagaccacgacaccatgttactgcgccagcaaacggtggcagattgggagagatcgggggatgctcacgattctcgatgaaaatttgctgcactacgtgcaagtcgctggcatacgacgcaatcaacgacgtgtgcttccgctccaactcgttcttgatgatctggcggtcgagtaaatcctcaaagcagtccagacacttgaatcgccccacaatcgtcttggcatcgtcaaatgcctggttgatcacggaggcgaggcgccgctcgagctccttgttcttggaccggaaggcgtagaagtcgtcttcaaagtgcttcgcatcgaggtccatcagatcatactgcacgttcttcatctgcgcgagagtttcctgaaagtccgcgtagatctggtgcacacttgttgtaagcgtcttccctttcgtacccccgatctccatctgcgctagcttctggaactggtaaatcgtctgcgttagctccaagacgtcgtggcatctctcgagaaaagcgtccagcctgataaacaaggcgttgttctggattcgccatgggttgcccgggacctccgtcacagatttcgccttgtagtcaaagtacacgctcttgaagtgcgcgcagacctgcagagacacttgcagcatgctgttggcctgttccagctcgccttggtcaatcaactcgaagagcttctcgccattcaagtggatcatggccttcctgatgatctcgttgcagatctgtcgaatcaaaaccacgagtcgtgcgggcgtgttgtagaaccgactggacttccagatgagcagaatcgagtggcagatcgggcggaagaggtcgcggatgtccggcagcgtctgcgcgctcgcgagctgctcgaaccacttggccagaggccacaggtagtgcttgttgtcattggcctctgctctcgcgaggaagacctccttgcacagcttggcaaacgggacgttgtacgtgctcttggacgcgtccagatactgcagcaccttgcgaatgctgtcggactgcagctgcgcgaagatcgagttgaggttcttggccttggcggcccagaagtgcagctcctccatggggccttggtgcgcgtggtcgcgctggttcagcagcgcctcgggatcttgcttcaggatgttcttgatctgcttggtccacgtgatcagacacccctccaggctgtgtacttggtccttgccgagcccactgacagcgttgaagtccgtctgggggcccttgggcgacgcgaacgggttctggttattggagccgtcgcctcctcctccttccggcgaggaggacgaggacttggccgcgctctccatgacgacctggtcccagggcagcggcagacacgtggcccccttggtctggcccagcgtgatctgcagactcgagtagaagccgtgcacgttgttgatgatggaggacgtgaccatctcgggccacagctgctggttgcgcgggttgccgatgagtggcacgaacacgtcgtgcagcatgagcgccagcgactcgagcgcgttcttctcgagcgtgccggacatgatctcctcgtggaacttggcggcgctcacgggcgccttgaccgtcttgatcatgtacaggaccgtcacagggggcgcgcgggctgtagaactgttgcggctgctgctgctgaagagctgcgcgggcggcgtggcgtacacgtccacgacgccgctggcctcgtccccgtggtccgtgaacagcagcagccgcgcgtccgccaggtgcaggaagtcaaagagctgcgaggccacggcgtccgtcgcgaacttgcggttcagcgcgtccagcttgatgcccgggaacgtgcgcaccacgtgccgccggataaagtcgacgcgcgcgtcgtccggcggggccgcggcgatgccgggatccgccgccagcgcgctggccgtgttgcctctggaccaggagcggtccgtctccatggatggcgcgcgcagcaggcggagagctcggatggaattagatagttgattgttgtgctgaaagatcgccacccgccgcgccgctttggctcgcaagtggcgaccaaccgacgtcttcaaggggtcatagtgcaggcggtgtatctcctgccgctgctgctgctgttgctacggttggacactgcgggtgggcgcgtcgttgaccgcggatgcaggctgcgccgtccgccgtcgagcagctccatccgagtgcgcaatatggctcaatggtaatttattcgtatttttcgggtgaattgataaattccccctctggaaagtaatatgtaagttatctatagttgaccaaactttcaccagaattttctagccatttcgctgatggatagcatacccagtgaagaagaccaccacaggaaggagcagattatggacaagcagcggatgaagcgggcgaatttgtgctccgtgattaagcgagaacaatttttgtgggtcgtccagatcggaggtgacgagttggtcgagcagctaatcgagaaaatcaaagaaagatttaactttccggagcacatgccgctcaaagtttacctggcaaaggacgagggtggcaattggctcagcgaagaccatcccgactaccaacgcatgatcgagaccggggagatgtcgggggagatcaagaggattgtccgcgagggcgagatgcagtggtaccagaagatgaacgacgaggagtatggctttccgctcgaacatgagcttgtgcctggtgtagttcacgtgctgcttgacattccagccgaggtgcgctctcgatgggctggctactctgatggtgcgtcatatacgtaggtggtgtggtgtctttgacttcttgttgagatttaactctgatattggtgtctgagcagagtatctggaatggctggaggagatgaaggctcgtcgttcaaacccatggtggattttcacgagctgcttttcgacgctaagacgggatgcaccgctacctgctacttcgccgtctgcgaagaaaagtacgtaagccttgcggaaggcacttcaacagcaacgtctttactgtgatttttgtccgctttcgcaacaatcgcaataggctgctactgctaatttcagcaattagcgtgatttgcatcgcctacccttcgtaataaaataataacagtgacttacgaatttccagtcaattatagcaaatccatcgtcagctcccgcgcatagtgagcccaagtgcgggcccagcgcgcgcagctactggccaacagcgctcctccggaggcatagttcgatccaagcatctcggcagcaggagacatcatggcgaaggcggtgtgcacgctctacggcgacgacgcaacggtgtacggcacgctggtgatcacgcaggcgcacgaggacgccaagagcgtcatcacgggcgagctcaagggcctgacggccggcaagcacgcgctgcacgtgaacgtgttcggcgacgcccagggcggcgtgttcaacccgttcggcaagaaccacggcggccccgaggacgaggagcgctgcgtgggctcgctgggaaacgtggaggtcggagaggacggcagcgtcaaggtgcacgtggaggacaagctggtgaagctcatcggcccgcactccatcatcggccgcagcatcgtggtgcatgagggcgaggacgacctgggcaagggcggccacgagctgtcgctgcagaacggcaacgccggcgccatcaaggcccacggcgtggtcggcatctccagctagacggcggcagacgcaggcagctgcagatgaagcagaggttactcactcactacaagacaaggctactttctgtcgtgctgcagcggtcgcgtgcggacgtgttcaggttattaaataggtaatgacacgtgtgcgatgcccctttcgagagtctgttgctgctgtgggcacggaacaggatgaagatggcagagatttttttcttgttgtttcagaggtctagaggtggctactcaattgaattgagctcgactgctggccggagctgcaggagctggacgcaaaatgggtgtggggaacggagtctgcagctgctgttgctgcttacgccgtgatgctgttgcgcttcccttcgtagaccttgggcttgtgctcgggcacgggggacggcggcgcgctctcggaggcgttggactggttgtcgcctttgcggctgctgctcttgctcttcttgcggtgcttgcgctgcagcgcctccaccacgagctcgagcttgcgcaggtcatgcgccttctggttggcctcgagcttggtgcgcgccagttcctcctccatgtcctggaagcggcggccgcgctcgctcttctggtagttgtgcacgtcggtcaggcgctgctccaggcgctgcttctcgcgcgtgagctccgccatctgcgcgcgcaggcgggcggcctcctgcgccgcctcgtgctgctgctccttgctctcctcccggagcctggccacctcgtccacgggcacgaagtctttgagctccatcacgacgggcggcggcgctagtctagcggcttcgtccaccttggcctgcgcctcctcctcaacttgacgccgcgcctccatcaattcctgctccattcgaggcacttcacccagcagcagcgcctggaaccgctcggcgtacgacaggcgggtggcagccgccaggtcctcggccacctcattgttgctgttctcgtcctccagcgccaagatgcccgtctcgagcttgttgctactgctgcttctcgccggctgctgctccgccagcatcaagacgccgaccacggcgtcaatcacgcgctttcccatggcgtcgtccacctgctgcacgaacgggtgtccgaggcgcatgtactggttgaacagcacgcgcacgagtgccacgagccccgagcgcgaggccaagctctccgtcagttcggccaggtagtgcgtcacgcgcgtcgcgtgcttgacgctcaggtacgagtgcagcagctgctggccagcgtaggccgcaaaggtctgcagcaggtgcagctccaggtcggactggctggcgctggccaccagcgccgtgtcctgcacgtcgtcgggcaccagcacgagcgccgtggagctgctgcccccgcgggaggacggcggcggcggcacctcgtcggtcggcagcgtcatcatgatggtcgtcttggtctgctactgctgctgctgcttgcttaggcgtgtgcgggacgcggcggagagacacgagtgccgagacaatgcgagaagtctcagctgggggcaacggcggcaaaaggtaaagctgctcgcgtgcgcctcttccgtaaagattgagatgcagacgtgacgagcacggcgactccggtggtcgacacatggctgcatgacgtcgccgcctcgtctcatgcccaacgttgaagttgaaggcaacgagggcctgggcctggaattttgtatggacctcgcaatgtgtatcggtgtgcgggcgtggagtcattggtcagaggtgcgcgtgctgctgatgagctactgatgagcattctgctggagatgagcagaaacgaaggcacgcgtgcggacagcaaaaataaaatatgccaacacttcactgcaactggagcacgatctcacgatctcgatgccgcacgccttcagagaacaagcggcgcttaactgtgcgcgtccgccatcgcatgtgtggcaacttcccgtgcgcatcgaaatagtcggcgctataaaaacaatcgacagcaaggctccacaatcgaccctcgcttccttccgccgtttgatcaaagcgagcatctcattcctcaactcaccaagctcggcacaagccccgacgacaacaaccctctgtcagcccagccaccaagatgttcaagtctttcctgctcgcgatcatcctcacggcggcgactactacgtcctcggtcagggccatcacctgcggcactggagagagtcagatgagcgttgaaggtgttgaaggcatcttctgcgtggccggcgacccgtgcatcgccaccttcagcaccggtgcttgtcctgcgacccaggaaggtctcccctatggatcgtactgcggcgtcgtcgcgtccggcgtctacggctgcaagacgtacactagtcctcaaacggaagctcccacgcccgaaccaacgactgaagctccgactccagagcccacaacggcagcaccgaccccggagcccacaaccgcagcgcctgccaccactgagccggcaacaactcagccaccaacgacgcagccgccgactattgctcccatcccgatcagtccgttcacgaactgctcctctgagagcactcaggtgagcgtacaggggctgaagggcgcctactgcgtcaatgaaccagtgtgtgtggagaaggtgtcgacgggcaattgtcctgcccctcaggacggtctgcagtttggctccttctgcgacctgctcaagaccggcgcttacggctgcaggccgtacacggccgacaacgtccccaccaatgtcacgtacgacgcgcccttggactgctcgacgaacccggcaggcgacacccccgtgagcatcgtcagcgccgacagggacttctgcgcgtccgaacccgtgtgctcgggcagcatcttcggcaactgcccgcagatccaggacggcttgacgcagaactccgagtgcatggtcattgacacgggcgtctacggctgcatgttcatggccagcacctaatcgacaaggcctccaatgccttacttctttctaccacctagagataggaccacaattaacccttaataccagcaaactatcacttcatgcgaatgctctggtttcattctcttccgcttatctcgttgccttcacacgtaaatatgcacttcagccaggaatcggcacctcatggctccctccctcccttcctcacttggacttgcacacggggcagacgcatccagtgcaaggacaattgccagctggacagccacacgccgggcaattcccttcggtcacacgcatccccgcctcgctgccgccggcacagggcatcggctgcgaagcagattgattcggaccgcagatcgggcagccacacttggtgcacggacacttggcaggacattcacaggctggacatcctccggctgcagcgcgttcagcggcggcgacacaattgccaccgcacaccatcgtcgacgaagtcgcagactggatcgggggctcgatggtttgcgcttttcctccttcggtcttgctgctgcatacttggcactcgcagtccttgcacgaacacttgtccgccggcgatccgcaatttgtgcaagactcgtggctcacgtgctcgccagtcgcgtgggttccggatccaggttgcgctgggggaattgaagtatcggcgcactgagccttggtctcctcttggtccttgaccgactgcacgtttgtcgtggttcccactgtcatctcgtcttcaaaggtttttgaaaagtgaacagtgaatggcacgtcgaaagcatcagggggggatttctcgcaatcctctcagatgcgtgcgacaccagttctcaagaaaaaggttttgcacaacggggtacaccctcaaccatcactgtaggcgagtcgactatttcatttacccgagcacccaccagcacgcgatgaaaacgacaaaactttactgggattgtcattctcagctcaatagttacttaaatgcaaaactaaaaccttacttcgactgctaccttcttctgtcattcagtctcttcgtccgcagtcgcagccatgggcaacgttggtccctttcgcctcgctcagttcacgccacagttctgcagagactcgttgaatatgcacgtggtccgcctctccatcactccaacagcagacacactcaccagaacttcactcccaacgcccgccaagcgcaaagcttagcgcagcaagccgcacatgcacttgccgccaggacttccgcagctgtcgcactcgccagagccatgggccttttcgctttgcttcccgccgagcagcggctgtgtctcctgcttggagccggcgtgttgttcactcgaaggcgtcggcatcttcatcccgctcgtctccttcttgctggtgcaagccgcgcagttgcagccttggcacgaacacttgtccggggggcagccgcagccacgacaggcctcgcgcttcgaacagcacgcgcggcacttgcagtctttgcacgaacagttgttggccgacgagccacaactcacgcagtctcggcggttatcgcagcacaccttgcagttgcagtccttgcacgaacacttcccagcggacaacccgcacgtcgcgcaggttccctgggtcttgagcgactcctgcggcaggtgcgacttggactcttgcttggcgccactctcgcaacgagtgcagcggcagtgctccgacttcttccccgcgacgcagcgcttcaagtgagccatctccagagcggactgcgcccacgccacgccgtggttgcacttctcgctctcaccgcccccgaagctcgccttcttggcagcgcacgagtgagcctggccttcggtttcgcagcagagcacaccgaagatcacaggcgtgtccgacgtcgtgttgagcttcatgattccgttggccacggcctggctcatggtctcgcacatgtgcgtgccgtcttgcacgaggcaaccgacgcagatcacggcgtccgggcggtggctcgagtccttgcagtggatcacgcgtgcagccgcgtacggcagctcgaaggcgcccgacacctccaccaggtgcaggtcttcatccgccacgcccttggccagcagctcctcggagcacgcctcggtgagcgagtggaccaccttcccgtaccagcgcgaggcgatgatcgtcacgcgcagccccttgccgtcgagtctgctcgattcggttgcaccagggtgctcaatgagcacaggactgtgcggcttgccttcgtggtggccgtgggtgccgccttcaccgtggcctttcgggtgctcttccttcgacgcgaacttcatcttggtcgtcgtcttctcaacgccgggaggggccatcgttttcagcagtgatccgcaaaatcaagagtgaccaagtcgagcgagctgtttgttctgctgtgcgacgtggtcacgaatggcttcaactgtaggaacttcaagcatagacaaggtttcgtcgctcgctgggaaaagtccttgctcagcagcaaacagccaaatccttcgcatcgcaccgttagaatccaatacgactgggaactcgagcagaatactctagccgcctttgagccatcttacagctatatgtatgtttcgtgtcccaccagttacatgccatttttccacgattcccccggtagtggaaaaaccagcgaggcagttggtcgaccttcattactactgcaagccggcaatcacggcggcttgcatcgtccaaccaattaaggcaccatttcttcctcatctagcggcctgaaggttgcatccccgtggaagtctagttcctccatatacacctgggtctgcaatgatagcaccaatcggactaatcaatcagccgcataatcacacgtttcccaccaatccttggtatcacgcgcaagtcgcgtctccgtgatgaggacttcgctggatcgacctgccgcacaaccaccgcatgatcgatacacggtaccgataccagcgtttgaaatgaacacactcaaggcgatgttcttgtcaaattccattgcatatagtgtttctagattgagcacttcctcccgtcgctcgcttctggttgcagctctaagtgctccgagagaatcggcgcgactgaggcgggggctcgtaatcgctcggaagttgcggttcgcaacgacagaatcgccggaagcgcgagagaggacagattcagcgatagactgctcctggttcttctcgtttcgccatcgctttccgctggtttaacaacactttcttcaaaccgtgcatgattcgccgactttttcgtcttgacacttgccgactccaagcgcttaatctcgctgtcccgcttggctcttcgtatcctactggtcatccgacgtcgcactcggaacatcctgaaagtcgactgaatgacgatggccctgcgccagcggaaggcgtatccacgcatagccaactcgtccaccttctcctggactgtgaggctttccagaggcaaaaccctcatcgtgagaaccagcagcagatccgtaaatcggaacatgtttggtgggcacaagtgatccgggttcgcactgacgttcacactgccattaagaccgtcgtagctcccaagaccgaggcgcactcgatacgtcaactcggcgatacgagcttcaatgtcgtgaaaagtttcacgtcgtcgttgatgtactacaatagacagtgctgtcagttcttccggcttcatgtcttcgttccttaagctatccatcattgcgttgtgggtaccaagtccaagcggaggctctagcttcgtgagcagtgccagtaagtgtttcctgtgcaacagtcccagcgcatctgtgtcaaagtcgctccaagtcatctggaagcgcttgagatgctccgcttggaagcccaagagctggtctttatcatctgctctggcagacatgagcacgtacgtgtcgaccatcgtggacgcgtacaaattctgcaggatcagcaccaccagcacgtagaaaatgttgtaaaacagagcgctgatcgtcggagacccgcagtcgctagaggagcgcccccatagtacacactgaggcggtgcgacactggaagccaagtacgtagcgtaccagtcctcacccgcagcaaactttacgaaagccgaatacgccatgggaaaggttgtcaagttgagattcgagttcaatccggacgcccaacgcgtaagtgagaacacttgcacgcccacaatggcgaagacgaagagtacataccccagcagaagcgtcaccttgagggtgagctggacgctcgccagtagagtccgaaacaatgtccgaagagcgcgagaccgctcgagtaccagggaaagatgcttgaagtcgaatgcacgggtcatgcccaggatgagcagcacgggcgagtcggagatgagggggcccaccaacatgatgaacgccgtgcagctattgaacgttctccacgtgaaccctttcatgaggaagtctctccacccgacagcggcgacgcgcagcacagcgtcaaatgcgtagattagggagaaaatgtagtggaaccaccacacaccagccgccacatccacgtctccatcggcattcccgcgatgaacgggagaacgataccaagcgaggagcgacgtgtgtagaatgaccaccgtactgataaatccccggaacgagcgcttttgcatgtacacctgagctagtagcatgaacttgctcgtcggaagcggatacttggggcgcattgctacgatcgcttgcttcttacgcagccagatgagctggaggttcgtgagtagaagtgttccattgtagcagcggaagttgttcatgagaatccctgcgaatactttgagcagataaaatctggtgaagaagagaaaagcgacgaagaatccggcgaagtacgtcgaggcaatggctgccgcttggtggtcgttgttgacgtccgtatcatccgcaaagtccatggcgatattcacaactggcagccagcctttcatcgataccaggaacagaatggatgacatggccccagtgatgttgtcgaaatgtaacccagaaagattcccccacactcgaggtgtcaggatgcccgtcgcgctgttccagaagaccccaacgcacttgtcttccgtgtcgacggatggatcactgcagtacgcgaatctcccgccaaaaatctgcatccccagcgtcgcgaacgagtaaaagaggaaaatcgagagcacgacgcagtagaaaatcggtctggcggattgttttagagcttccgtgatgactcggaacgttctgacgcggtaaaatactcggatcgggccgaatgctcgcccgagtcgaaagagggagatcattgtcgagtggggcaatagcagcaggagggaacaggccatgagcaccaccatattgatctgattccatgtatccgagagataacttttgggagtgaagatgaatccacgggagataaccttgagcgcgaactcaaagaagagcacgaaagcgtacaccacgtcgcttaatgttgtgagttcctggatgagcgacgagtacagaggcgactgcactgtcagcatgacggttcggatcacaatcgctgcgaagatgtatttctccgtctccttttcgagtcgacgcgctttcagtcgcacccatgactgcggagggaagaggaacaaggacacgtccgccatgagccagtgtccgtcgaagaactgcctcacatagcccgttgctccgcccgaagaagtccaccccgtccactcgtcagaagcttgggtatctgtcgggctttcgggtcccgaagcagggacaaccactgcactagcactagcagcagaagtagcagtagtagtcccatcttcgatcggagctacactcgcttggttcttctgttttccttgggctggagtggggggctcgagttgaaagtacttgcggtcctgctgggtcttcgtcgtcccgtagtaccctttgagctttaagaagtcggacgttggcaggacattgaacaaccgcgccttgaacgcctccgaagccgagagagctcgctgagcgcgctttttcgcgcttcctggcaagctgacgttcatgatatccccctggtacaggttgctaaactcctcgacgaaagtgtacatgtcgaagagatgaatccgctgcatggcgaacattcggtcttggaacaactcgctcagtgttttcctgcgttcgtcccctttcatcgcaaagttgcggagtagtacaaccagcataaagttgagagcaatgaatcgacacagcacaacgtacgcgaggtagtacagcagcgcgactccaaacgaactcgcctgaagcgaagcgtggaagatgggccaaatgctgccaccattcgagaacttgaacagcgtgagcatgctgtcactgaacgtgttaaagtgtgactgcatcgtgagcgggaagttgcctccgaacagattcatgccgactacagcgaacacgctgttgagcagcagatggaacgcaatggagctcaagaacgcgggaacactcgacagaatcgcgtccagtaccagcagcagcttgttgttctgacgcacgactctgaacggcctcactaggcgaaacaaccgcagcacgaagatcccgcgcgcgtagctgtccgtatagaggagaacggagcacgtgagtagaaggaactcgacgcacgcgatcacgagcagcacaaagtccaatcggttccacgggttctgcaagtaactgaaaagtccaccagcagcggctgcgatgataataaattcagtgccatacacaagcataaggaagttctcgatcaggtacagccgagccgcgtagctctcgctcattccgtgatattccagcgcgaacaatacagaattgaagaagaccacgaggttcatcaagtgctcgaacgccaacgactcggcaatggacgaaattttgtccatggtggagctcccaggctcgataaggaaaaatatccgctcttgacgcagcctgcaccagcttaaaaacgtgccgtcggaccttgtaaagagaggagactgcagtaaccactccttgaaccgtgctcggtacacttgccactgcgcatcaaccacttgcatcacgtctgggaaagcttccgtccctttggggaactgcactcgagccttcttgaggtatttctccattcgtttctccgcctccgcgtgtttcgcagcgcgcacgatcgacacagtgatgtagctgccacgaacgattcctacgaacaaggacaggatcatgtagctcacaaacaccacaagcccgatgaagtagatgatggagagatatgacgaggcctgctgagctccgtctagtgatggtccaaaccccgagcgcagcgttatcaaaaatacggtgaggaaggacgcttcgaacgagtggaagccggtataccctctgtccggcggtggcatggctacgcactccatattggacttgcaactcgacgcagtgtcgtccatccggcagaaatggactggagtttcagccacgtacgttttactagactctccagcagccattggggcgataaagatgtccgaatccgcttgaatcgcacagcgatgagagagtgaatcgttgaaaagatacatgcccaagatcgcgaacaggaacaggtagtagcaatagcacagcaccgcatttcccgccatgggtaacgagacgaggaacgtctccatcgtctcttggaaacttttccagcgcttgaagatcctcatccctcggaacacacgcagcgacaagaggttgaaccctgcaagtgacgagaagggcagcactgcgagccagctgatcgtcacggcgaagaggtcaaacgcgtcccacttgctccgcagcagcggcattatcccctcaaggccaacacctttgcaaatctgctcaatggtgaggaacaccagcagcaagtactccaagacggtcatcccgaacctcgccacctcggcgatttcgtcgtcgtctttgatgttcgtcacgtaccggaacgaccgccatcccaccgacgtcatgctgcccaccacagccaccagcaccgccaactcgaaagacggatgcgcgatggcctggtagcagcgagttggcagccccgtcggaagctgaatgtcactgaacgtgacagaatcttccgactcggggctcgattcgtcttccagtcccgcttgttgtcggaagaaagcacgcgcaatatcgcgcgtgtgctcgtcttggaattctaaatcaaaggtctccactgtggtgtcagctgtcctcgtgtggtggtgctcttcttctgttggtgaactgttctcagtcgttgtctctgattctgttgtggctggtgtgggaggacttgggggtgtccggggcgcgaaacacagcgataagcacctctcgtcgctctctgggagttcatcagccgttaaatacttgatcgtgcggacaaagttggtggtctgacgccccgttcgcacacttttagcgtctgtgatgacgacactgacgctgttcatcaccatcttggccagtagagacggcggcatgtagctctgcagcggcaacgccttgggctgccagaccagcgtcactttatcctccagcagtttcaagtcgccgttcgtcggctcccctcgcgctccgtgcagcttggcacacacatttccatcgcggagactgtctcggaaggcgtcaatcagcccctcgtcgtgcgaataggaggcgatctcgctggcgtcgctcatcgctcgtgctgcttgtttccaccccacccacgcgtgcggctgtgacgcatgcgcggcgagcgtgacgtgctgacaggaactcgcaactgagccacagagccttgaacacggagctaaaattatcgggtgtgaactgcagcacgcccgatttggcagattggcagagtggtggtcactttgttgcagttgttcaacgaaaaaataaacagttgaagtcagcaacagaaaaaaaaacatacacggccaaatccgtattgtgtcgcaccgttagaaccatgtacctacagtgctcgttcgaagaagctcgaacagtggtggggtgaactttcactcacttcttgctaccgtcacgattcatccaagccacgctgatggcagtctgcgcccactcgactccaaagctcctcgctttcggcgtcagtccagcgcactgacgagcctgggccatatcagtgcacttgagcacgccgtagatcaccggcgtcttggtctccaactccaccgccatgcacgcgtttgccactgcatcagccgcagcaaagagcggatctccttccgccaagcatcccacgacgaccatggcatccagatgcactggggctgcgacaatcaattgcttggtcgtacggaagctccgtaggcagagcgacctgcgcttgtggctctccacgcccttgagtagaagttcactgcagcacgtcgttgccaaagcatccacaacttccgcggagcctcgggttgaaacgacactgacctgcaagcccgccccatccagctcgggtgtcgcctcaacgcaaggctctccaatcagcacaggttttggtactgcaatgttgctcgcctggtccatgctggtggcggtgccggctgccgcgatggtggtgtcgaggatgacgagaagcctcgccgctggtgctgtcctggctcttttcagccattctccttagccctttcaaaagcaaagtggttgccagtgggtgggaaaagagtaacggggcaaaagcagcgacgagggcagcgaagaaaacccgttgcattgacatcatcacgaaatttccacgaagctgtacggaaacaaaaaaatcttcatcgcttcacattatcattacacgacatccatcgtacctttcctcacttttgtgctctatcaatgcaacggcggcaaaactcactccgtagcgaggaacttgactccgtcctcctcgcacgtttcgccggcaatcaccgcagcctgcatcgcgcaacagcatcgaccatgagcagccagaacaccaggcaaacttccacaccctacgcaccttcccctccccttccagcaccttgagcgcttcacgcagcagccagggctccatcccgtggatgtctaacacacaaaagcacatagcaccaggtacagtcagtcccctgcacctgcacctgcaccttcagcttcaccctctttctactcactcgtgcccagcgtctcctcgccagcgtacagctcgtagaccgtaaagacgttgcccagcatgccgtgctccttggcctgcaatgacagcaccaaacacggtcacagatgttgtcacatgatctgcaatcatttcggtacacgtagagacaaagcgccacatacaaagtcgtagatctcggcggcccactcggcgggcttcttccacatgatgcggcagcgcgtcttggtgtcgtcctcccagcggccgtggccgcagcggatgaggtgctccaccaccgccagccgcccgtcctgcgccatgttgcggctgatcttgacgttctcgaagagcgacgacgcgtacggctggaagagcggcaggtcgtgcgcgcggtggtactcgaggatcagctgctgccacagcacgagctgcttctcgcgcgtggcgcgcacgggctgcagcctgcgcgcggagagagagaggaagcaaattgttattatttatgttcataataatttttatagttcgatggaggacgcacgtgaagaagggggggaagtcgtagtactcggggtatgagaacttgtccatggcgcgcggcgagggcgagagggggcggcgtcaatgaaggcgctggagctcttggtgatgtggccgcggctcctagaaatgtgagacctagcgcaagctagaattgtaggttccattggagaggctggttttgtaggtgaaaaagtaagtgagtacctgaatttgtaagttgtatcgtgtcgtgagtgatgccctggcgtcgaatagtttttcgcttcgaaggcgtttgttgaatgcatttgtcgaatgcattcagcgacttcaaaagccaggagcaccttcacatggaatgaactagataacgcgttaaatactagataagtgtaactaggaacgctgccaaagaagctcatactgtatgtctttactcgtttgtggtttcactgcgcgcttactagaactcgccgatgacgccgtccaggttgactcgagcatgctcgaaaacaaacgctgcgtctgctaacgaacctacaacccggagcggcggcgtcaagaagtccacagcctgctccatgcgcaccacccgtttgctcttcttgtcccactcgaagcagagctggcacggaagagatagccgctggcctagcaacttggacctcagtagcgctactttatcttgttgcggtgagttacatctgtctccacccacctccacgaagtgtgggaagacgtactgcagtgtttgctcggaaatggtcacgttgagtgaggccgtggccgcgatgaagaagtcttcggagactcgagtcatgtgctccacctggaactgcagatcgtcaaagctggtcgtgtaccgcttccactgctcgaggagcgcattgacacctcgctgctcccccagcacgacgtcatcagacatggatgactgcaggaacgatagctgctgctgggcctcggacctctgcagccacgcttcaggtcccaaggggatttcagcgaaaggccgagccccattacggaagatgtggaagtactccatcaccacgcaccacgcgctcgacttggcgccggaaacaaggcggctgtgctgtgtctccagcagcgggatctcgtgtcgaagccgcaccaccgtggcctcaaggtcctttgcgtactcggtctgcttcttccggtagcgcgcttggtttgtgcgacattgctcgcgtcgccgtgctgttttgagtcgaatgcgcttacgggcttggggttttctgggtcggtggtttgaatcgttgtgaccgaaggcatcgctctagtctctgggagcagtctagctgtgcggtcgataggacacactggtggctgctgtaaggttggcgaccaagatgttaagtgtttcgccggtgcttcgcggggctcgccgctcctactcacagcaacgttatccacctttcgagcgaggtaggcctccctctcatcgtcgagatggttctgctgtaccgcgaccgaggccgagtccgcgatttccagcgacgtgtttgtagcaatgggcgggcgtcttgtgatcgaagtcagacgtgcattgtgttgtttggccgtcgcgggtgaactgcagacaggaggtctcatttggtgaaacacagcgccgccacgtcgggcatacgctcgcggcatcacgtggccgatcacgtcggatgttaaggcgtggtctggctcatagcgcgcgaagatgctgggaatgcggtccatggttttgtgttgagaagctcaaccgaaagtggggagggaggagtgggcggttttctcggctaggagggcgcgcggggccggtcggtctgttggctgatgggcgactcgagtccaggttatcccccgaatgaattgccatcactctcgtatgagatcccgcgagaacacaacaaaggcgcagcactggccaaaagtccctggcgcgtaaactcgcgaggactgttgttgctaaactatggatagtgtttagatcactcgcagtgtggcaatcgcctacagaacccatgtgggcgagccgtcagcgagtcggtccctggggcgcatctgaacccaatacactgaccggaccgctgccattgtattgggcggcatacatacagcttccaagggcgtatacatcttatcaatgcgcacgccatccgcacagcatttcctggcgccatgttatcctctgcagcttcgccgtcctgtcacaacgaattgccgctcactcgcttcgtccaagtgcattctgtgctgtgctgagctgtaaatgtttcccggttgccctgcgatgagagtacgtgcaagtgggggtggggagcataacttctgacgcgacagcaacgctaaccggttgatgccttgctgctaatggccgatgagttccagcattgatcctgtacatccaacccgtccaccgtcagctacggtgtaaagtagaaggctgtctacacctctacaaaagcctccaaacgctttcaaaagaagaaacacgtgaagtctgaggtgctcagtgcaagtaccggtactgatgtacgtgtacatgtgatgtgtcatatcattgtactcatgttgagcggacgtgtttcgtctgcgcccaagacgtttgtctccttcctctgctcctccgatagagaacaaaacaatgcttgctattacgttggagtgaaaacctgtgattcagccataggatagtggctagacggacagaacattgattacgttctgtccttggttctgtcaattcatacagaacaatgcacagaacattacctgtattactttataaattaccttgtaaaaattatcacgcacgcttccaaagcgaatcgcgtgaatctatcgcattattggagctagttcccgtgttgcagcacacacaatggacagtactggggcacgtgtccagcggcgctgcgctgcactgggtagtatgggcaaagctggctccgctcgcttgggcgtcctagaactggtcgtgggtggtgcggccttggtgaagaatactcggggtcgccatccccgcagccacggggcacttggagcgtgtatcggcccaaataccttcgttgtggcatggtacaacgggaaaagtggtccttttcaacgtacaccaaaccaggcctagttatcgtgggatgccggatctgtacgtagcaataagtacacggtatatacatgccaacgcagctagacatacgaaggcaaattcattgtaggcttagtgatgtttctatctgcagtaccattcgttggccttcacgagcaccgactagaagatcaataagtcgttcgcaaccaccacggcttttgctaaagctgcttcgacatgatgaaactcgaggacaagagcgtgggctaccacaccaatgacataatgccatacaatcaattgcctgtctcccgcgctaagccaagtgcaagcgggtgcaggttctctgcgtttacgtgtttagtgccctgaagagtcactgtagatcgttgtcccgcattttgcactcattggcgcccacagccttcatggcttgctctagccatgccacgacgacgaagatgtcatgagggtgaaaagctaagcgggaccgacgtccgctgcaatgtcgagccgatgctgatctcgttggtacaatcgaaagcgggggtatccgcagtgctgcgccttcatagcacgtagcttgcttcggctgtgtgaatacatggaacccaaaggaccgggccattggataacgtaagtttgatctattttagctttagtcactccggcctcaacgtttgtgtctgtcaaaactcgataatgcgatctaggtagatgtacgagttagaccaagttacatctaggacccggtggtcttggtagcgagcagctacacaagtttgtagtggtggagcgacgtaagctctttcggacgaattgcgctggccaagttgaggcgcccaagcctccttaatttgatactcagactctacaactttatgtcgcctataccgaaacgctccgaggtgttcctcgctcattttagaatacgacgcccacgaagcacaatgcaagaatggcgctgacacacgtacaggtttgaacgaatgatgtaaatgctttcgctgtctgtaatgactgacgctcgcgtctgcatgctggtgtacaggatgagctgctgttgaacctgtctgacgggctctggcttgcgtcagggtgcgtgtatgccgctggcgcttcattttccgcagtgtcggaccaacggcggcgctctcagtgcctagtcgtgcatcaaggctgtgctcctgcggctatctttgacgtgtcggccccggaagccttcttccacgaggggcatttcatgcgagttcatggcggaacctgtgcatcaagctcgagctcagtgagttgaagaccaaggcggggaggttccaagtacgggttcttcgacgtaggcagaagagttactgtccgagtcgagccctactcgacgaagtctacatggacttgctgccttcagcaaaggaaacctgctgtgcagcgacacatcggagaagacgagggcgacaagtcagagtatcagtcgggtgaagtgttgacgtatgccacgacagctatccgcagctccaacaaggatatcgtacgcattaattgttgagtatagccatgatggcacaaaagctgcgcagcaagtatggcatgaaagctgcggtgatctattgtgtaaaagtaaataaagctttgttagcccccaatgcgcttttgatgtaaacgcttctacggggctttatactgaattcagtctttagcacttctgcgcgactgtatccggtcgctagcaacttaaattcctttgtcggtggcggttgcccaagcgcatgaaacttacagcactgttagctttgagttcacgatgtttataatcaacgcgagctttatcagtgtgcatggcgtggtgaagcaaacaacgctatcgtttgagcacgatgcgcgagggttgttggcaagtatgttcatccgtggcacttggtgcttttactgctggttccaatagactgttctgtccaatgttctgtccggctatgacagaacactgtacagaacacccattgtgttctgtccgtctagccacagcccagccatagtcgcttattctcaatttcggtaacgtcactcgggagttatcgggaatatcattttctgaatctaagcttacatgtattgaatcaattctattgatgcaggatgaactaataggcgaaccaagcagtgacgactacaagtacggatgtagacggggttttgttttctggtactgatgatgcagtcttcatgacacgagccattcgttagctacaacccaccctcgttctccgcttgtcctgactccacagcatttgctcgtcacgcagaacattgtcgtcgggggtgatacgtgctcgactgaacacgaatgcaacatcttcaaggttgcccagcagcttcagcatcggcgtcagcatatctgcagagtgctcaagactgtggactcggccgcatgtgtcgtcccatccgaagcgtaccgagccgctcattgttacgtgttggcccagcagcttcgcaacaagacgttcactgtgcgaggcgttcccattgaataggtggcgaaacgcgtggtaaagcgtgctctcggtgatggtcatgctcactcgagtcgttgcaatgacggtgttgggagcgcccatttccaggcgctcgagctcgatgtcaagattgctgtggtagagcgagtagagccgccagcgctccaggagtgcgtcgatcccatatacactgccgtcggtgacgtctggtgtcatcatggcccgcagaaagtcgagctgcgcgtttgaggcctcgagactatggtatccagtagtccccaaagtcgctacggtggcggtggaaataccgtgcttgaagaggcctaggaactccgctgccacgccccagacagtttgcgtacggacaccctacgtcatatcttggcgtagcttcgctaggttttcacttgcacgcgcagcgtagcggtgtcggtctccatcttcaacaggtgctcgtgctgcctcctgcggtatcgcgcctggttctcgcggcactgctctcggcggcgctcgagctttgcgaagtagctctcgtggactgccacgcggacactggcgatggaatcgaactgaggcattcagaatgtgctggtgctggtggagtgaaagtcaaagtggggacacgacatgcgtgagcgagctcaacacgcgtggccagagcacttcgagattgcgcgacattgtaccataatacgacaacagattgtccattcatcgctaagttgtcgacgcgagccaaccgataatggtgcgtggtggatgattatgcgtaacatcacatcaactaaggttggtaaccagatgttctcgttacatgctactctccacgaacacgccacacaccaaagccacgaacgaacaaggtgaacattcaaattgaggagtctaattttgcagtagaagattggccttgggccttttagtatgacgtcgctagttacgactattatagcgacgacttcgacggtgtatgacatcatgaagagcagcacccatgcccgatccaacgcactggccggtgaaaaatgcagttttcgttacggacgatgaatataatctacgactcctgcacaaacaccactctgttaggtctgaatgcggggtattcgcatgaacatgatgcgcttaccgtagtgcttcaactgtagtcgtaaaataaatatggtccacaccagtagatgcccttggacagtctgagcgtgagtttccaaaacgaaggcaagttgatacagtggcgaaattccaagcgttttgcgcaaaagagcgaggagaccaagaaacccaacaaattccaccgaggcaaagatggcgatgttgatcacagatccgatcaacttgtcgaatggcaatgccgtctgaggataatagtgtgccgcaggtagttgggaaagaactagcaaatacaatccgtagagcatcggcagcgtacactcaatgtactcggcgattagtaaatattcggaatggaacagggcttgaagaacatcccacgccgcagcttccgtttggttatacgacaacgcagcgcgcaatttctccgctgaaattgctgtgttggagtccattagtcttaaaagtctcctcggggtggataattttcttcgtgtactcacgctttgaagcgaaagagaaaggagagctccttttgaaatggcaagatcaacttgttgtggggcaatcgaaccgagaattggattgacacttttcacctcagtcgcagccggtttcggagcacaataatccgatttttgggatggcgaattggcttcaatgttaattttgctgacgtattggacttcgacagcgggtaattaacgatctgcatgccgttgactgcgaacttgtttagcatcgcagacttgtcgtcggatagcagaaggggaaatggcgcaaacacttgaatgcgagagctggctggtttttggtgtcttcggctccacgagcaacttgcttagcatagtcgacaactcttcaaaacattcgactggttgttcagtaatcgacttgctagatcttcctctcttcctggcgatgttaatctggtggaatatggcccgaatgccaataatgacatggaagcagtccaaaccgaccatcactactgtcgttataactgaagtcgagctttgcatacaaatcgcaatgtacagtacgttgaacaagtccacagagaataccaccatcatacccatgtagcagtgaaacccctcggcagcctttgcgatgatagcttttgctgtaaacttgatcagaggcatggtgaagacaaaagcggtctgttggatccccgaaagccgattgaatattgcagtgaagaggggatagagcactgccacgattccttgggtgaagctaataaacgcgatcgcttttaattggctgtgaagtagcggtgaggttgctacggcacgggggccaatgaagaagatgatcagtattgggaaaattaatccaaatggaatcggaaatcgccacactgctgcaatcccaattgacatcaagaggtagctagaagcgcttcctagcgatatcgtaatggctttagtggctgaaatggcacttgctatgatcaccgctcgaacttggatggcggtacccattgagatcgcaaacaagtcgaaaaaaacacggatccaaaaggtgtagttcgccctccagccttgagacggatctcgtaacggaatgcagtcgatcagaacgctcagcagaaaaacaggaacaggagtcagcaggcaaactgcaacagcgcgggttattgaagtgcgctcgtaatagtcccggagggcgagcacccgttcgacggagtattcgctgcgatgtccaatttgagtccgatgccagaatgatgctgtgaatcgactaccagcattcatctccacttgctcaggttgacggagagaagaacccgggacgacccgagattgacggtgcctcatggcgcgttacgaaggatgcagcacttgttggcaattgaagcgcctcacacaaacaatgaattggaaaaaaataagtgtattttcgtcttgtgcttcgtttacaaatagcattcaaccttagtcaaaaagtgcaaggtgactgtcgggattaagagcattcatggacaacaaaagatcaaccggcattgtttgttgtccacgccgggtccagtaaccctgcataatgatgggttatctgcccttccgcagagtgagtccgggacccggtctcttgtcgaaacgaagaccccatgcaaataacagccattgcccctttttagccaataataggtcattataaaacgttagctgactcattaagctaaaaatatatatacatgtatacttgaaaattgtattgagtcaatacctacttttctgtggaccacaattcgagactgcccgtaattacacgttatcaggtgtacttttttcatcctcttgaggcaagttgctgcttcattgttcggcaactcgcgcccaagatgaagaccacggacacgtccgccagcgcgtcccccaccagcgtcaccaacgtccagacaaactgctgctggtgctaccgctgtcgtcaagcccgccgccgccactcgagcccgcaacgagccgctcaagcccaaccgcctctgcaccatgcccgggtacacgaaacttgtgcgctctaggggtctctgtaaggcccatggcggcggcacccgctgcatggttgacggctgcgagcgtggaagtcaggcaggggcctctgcatccgccacggcgaggcaagcgctgcacgcagcccggttgcaccaaggcgtcccagtccaacggtctgtgcaaggcccacggcggttgccagagcgtcggctgcaccaagagtagccaggcgagaggtttctgccgcgcccacggtcgtggcccgcgatgcgagaaggagggatgcagcaaggaccccgagcgcgaagggttctgcgccgaccacggtggcttccgcttctgccagtactcggactgcaccagggaggaccgcggcggaggcttctgcaccaagcacggcagcggcaatctctaattgacgctgcttcatggcgcaactgccactgagcagtaggtccacggcacaccactacgtgtctgcgtatttcaagtagcgttcaagcagccaaggacagtgtggtgacttttatcaccgccactaacatgatcgtcttcaccgagctgcatttgctcgtttgcttcttcgttccccctcattcagggcaacctgatgcccccttcaaaccctcactgcaactcactgctggcggcggcgaggtccggacagcagcaacggaagagaagttggcaccagcgaccgacagcaatgatgctgccccagccacagtcgttgggaggcgaaatcacgcgaattttttttttcgtgtcgaatacggtaacctattttgaaaaccgtattttttgcagataaagtattatagcttcggtgatattcaactgagtgtaaatttggttcggggctctagtcagaaattctcagtagcagaagtgcactgtagccatcttgagaggagcatcatggcgtccggcggtcggcgcgccgtgctgtcgctgacgacgcgcttctgcctgccgcaccagggcatggcgacgctggactacctcagcaggtacagctccacattcctctgcgtcagacgcttgcaacgcaccccctctcagcctccaactcgccccacaagcacactaaacctccctctctgaatgtcatatctcatctcacagcggctcggcggtcgtgctgcgcggctcccaagacgcctcggacagctcctcgctggccgtcgccacgtgccagcacgtggcgtgtccctggctgttccctcagtacttcacggccacgtgggactggctgcagttcgtgagcgaggactttgtgcgccactcgctgcagctgctggccgtggacgcgcccaagcccgaggtgctgctggagctgccgctggcccgcaaggtgcagacgcacgagagtcgcgacctggcgctgctgacgctggcggacgctgacgcctggaagcaggcggaggagagcttggggctgcacgcgctgacgctgcagcagacgccggcgcagcggggcgacgcgctgctgttctcgggtcaccggcagctggaggaggggctgcagctgcccaagggcgtggacggacacttcgtggggcgcagcagcagcggccaggagttcgcatggagtcgggagctgctggaggagggaatgtgcggcggagcggtgatcgacgcagcaggggacgagtgcgtgggcatcgtggagggcatcgtgccgagcattggacagggggacgacgagccgtcgctacacgacagagaggcccacgcggcctggcagatgcggcaggcgctggcgggccacgtggccttcatcccggcggctgaagtccgcaggttcattgacgacgaggacgcgggcaatttgctgctcacgggcatggggctgcctgtgcatatgtgaatgaatgggtcttgtgaagatcatagactagatagaagactgagctattcctcatcaacaggctcgagctgatcgatcgaaggatgcaaggggaacgtgttttggagtggggagtgaatagctgtgaggcctctgaccctaacgactgactgtgctgtgcctatgtgacagctctcttgttggcgaaggcggagcaggcaacagcgagcgcctggatgggggcgagaggcgccgcgtagtccagcgtgaagcgggtcttggacactttgccaaagcgcaacgccataatttccacttcgtcaccatgctcattcgtctcgttgccaacgagcaggaagttcttcttcgaggcgaccttcacgcggccctggaagttcagcgtccaggcccccagctcctcgttccacgccggctgcttggtctcgaagacgagcaggtctttctcgtactcttcctgctcgacggctccgtacgaaatctgccccatcgaggcggtgcgctcgcctcgcatccgagccttcttgatgcgcatggagcgcgcgtggccctcgacgtcgtcatcgtccagccagctgagagctccgtccgccgcgaactccaggcgttgatccagatcctccagcgtgaaacctcgcaggcgttcagcgatcgacatggtgcgcgactgctgctggcgattgaatcggtccgataaactcgcactgcggccgagtcgggcagggtgtgtgttgaaaatggcgccgtcgatgcccattcctgaacgttgctgacgaagcgtacctgacttgttagaacctttggggttctcgagctcttcgtcgtcttggtcgtcttcgacaggtttggatacggcacacttcagggagttgggcacacggccgagaacgttggcggtgtacacgaggaacgcgagttcgttgtcgtgctgttggctggagctcgtgtgatgatcgaatagtgtgaactcggtaccgaggaagctgggctccaagcgtcctagatacacagcggagtcttcgctctgcgggagctcgcgcatcgtacgcaggtgggaatcgcgcattgtgtgaaagataaagggcccggaaccatcgctagcgcaggacgcagcgagcaagaattcgcccgtttcctcgcgatggaaattcagagccgtcacgaactctcctcgcaggcgctcgatgcaccccagaaccaactcgtgaggattttcccctccagtggcgcgaggcggtcggtagaatcgctgtttgtgctggtggatgaacttacgtgcctgcatgacgtccttgtcgttagcgtagacgctcaagtctccagcagcttccagtgacttgaagtggagagtgtggcgcgacttgccagcgagacgaagcgcctccaacgtttgctggaagttcatttcgaggcacgcttccccgttgatcgcagtgaggacgtctccgactcgaatgagtccgcagcgcttggctggtccatcgtcgcctgccgagttgatcgcgcggaaacccttcaccacagcctgccgcccgtaccagtccgtctcaagatcgagaccaacaggtccgtggtcaaacgtgacgtcatatgaatcgtagtttcgccttggtgcagcaggaagagtcgagttgggcgtgccgggacgtggagaggagcttccgagtgagaggagacagtcaagcagcgtgacagcgaaacctttgctctctccacttcttgtactcgggaagggctggcggaccagagcggtggacgtagcgtgggttggagtattgtttctaatctccatggacggtgaggtgacaccccaaccagatccggtgcgttcgcgatcaaggcgtgacgtgtcacttccaagcattggctcgcagttgtttctgtcggagtcatcgtcactgtccgggtggctgtcgtggtcaggtagatgccgtggcggtggagacacacgtttggcgggtgaagtgcttctcccttcgagctgcttatgttgtcggtctttcggtgcgaacgtgacgaagtcaccccagtcgtcactcggatgatccacggccacaactttgagcgacgttgctgcgacagccgatgccgacgctccttccgtactgtcgaggtagctgcaggccgtcggagtcaacagcgagttcccaagccacggatccgcagctcgcgcgaggtttaacgctgacagagggtcgagctcacttgcggcttctgcagataaggatctcgtattcgcagatcgactcggtgaagacggccgcttttcctcctgcttgtcactcgctgtggtcttcgcggtggatggagactctggattcgactcgagcttggacgccatcgcagcaccgagttcctggtggtactgctggaacgtgtcgatcgtgaagaacgacatgcccgatcaccttcgccttcgtcctgctcgaatgcgctatcaacggggtgtcttggaatggccaaactcggcaaaaacagttttctcgggcctgagagctatttgcgggagccaagccagtgctcctcaaaagctacgatgatgtgtacaagtcgtgataaattaccgagtgcagcaattcttgggctcagacgcggtatgaaagatgccgttgtggtgtggaatggcgatagtactggaaagaagggtatcatttcgtgaccaagcgatattggcactatggacaaactgagaaaaacattctcgcgcttctggctgttgatgaatcgcaaagcaagcagcgctagagcgcggaacagcacgatgtagcccagcacgacgaaaaagttggtccagatctcgtcgtgcttcatcccgaacacatcttcggtgaactgcttgacggtgacggcacccgtagtcaccggagcattctccaacggctggcagcccagttgagagtccacgccactccacgtcttggtcgcttcgtcgtaaaggggctcatcggggcagtctgcaaacactagcgcgccgaggatggcgagcgagaatcgttggggcgtgatggtgtacagccagtggtagcccgacgggatgaggttggctgggggactgaagcccatgaagaggaagaagatcgagttgacgagcactccgatgatggcggccacctcctcgcttggcagtgcgtacacgaacatctgccccatgtaggtgagcatgaggacgaggaacgaggtgttgatccagtacagcaagaacgtcccgaagcccgtgaactgcaccaaagggaagaagatggccgtgaacacgaaggcgctcacaaacacgtacggaatctccacgattgacgagccgacgaagtaccagaaggcagagtatgtctgcgtcgagcgctctcggtagaatgcagggcgatcggccgacgacactgacagcacgcactggaacgagatcatgccgttgaacagcgtcgccatgaagatcatgcccattcccgagttgaggccttggtacgatttgtagttggcttcacggaacactaagccaaacagaagccccaagaatactgccatccccacgcgagtgaggttgtacgtcggcgacctccagtacatgtccaggaaccgcttggtaaggaagctgaactgcgtgatcgacgaagccgctcgcttcttcgcgaacaacatctcgggagctgcagccgatggaacaccgacgcccttacggttcaccatatcgtcgagctgacttttgttcgcactggcattgaacgtagccacgaaatccagatcggttgggacgtcgttcagcacaccagctccgatgcactcgagcatccacgtggctgaatgtatcgcggtggtaacggagctaacccgggcagctcttcgaagtagtcgacaagttgctggcagttcggccccaagtccccgaagaacacggtttcaccgcctcgcttgagcagcagcaagctgtcgaagaggaagaacacctccattgacggctgatgaatcgtacacacgatagtgcggccggaattcgccaccttccgcaccccatccatgataagtttggcagagcgagcatcgaggccactcgtgggctcatccaggaacaacacgcttggctgggctgccaattctactccgatggtcaggcgcttcatttgctctgttgagctaccacgaatgatctggtctgcgatgtcccacatatccagcagagtcaagcactcgttcaccgagtcatacttggcgctatctggaacgtcactgccctgacgaaggagcgcgctaaacgccagagcctcgcggatggttgccgcctccgagtgcatgtcaatttgctcacagtatcccgtgcaccgtcgaatggccaagtcgttcgcctcatacccattcagcagaatttgccccgagattgagcctccagttttccggcgatgacgtcccgcccccgacgcgcccatcaatgctgtcatccgtccgggaagcgcatacccgctgaccccgtgaggagctcaatggattccttcgggttcgacggcttcggaacggaatagtgcaagtcgcggaaagccagcgccaccggagtgaaggacgttggtactgggaccacgtctagaatggcgttgtcgcctggcttgggcagagctttcggtgtcgttgccagagcgtacgcagactccaaccggtcttgagtcgccgtatccttcggcacatcttcctcctcgacgggagagtcggacaccgcgatgttttctggcgcctcgtatcgcaagtactcgagcgagaagtatcctagcgtcatgcacccgacgtagaacaccatgtacaccacgcagtacacgatccagatcctctcggtcttgaagtcgaacagctgcagatagtactcgcccatccgaagccccccgaactcgtcgcagtagttgatgcctccatactcgcatacgtccatgtcagccgagcggtactcgatcacagctagagcgcgcagcgtccacgagaccggagtctggaagaacgtgacgaacccgcccatcaccttgaagcgcgttcaccggcaccgatttcaaataatttggccggcggcggctctttggcggctcacaatcgaattccccggagcgcaaagatggcgcaaggtgagcactgggtcgggcaagcggcccagcaagaagcgcgtgcagttcgcgccccccgtccttccggcggagcgcctcaaaatcactcggaagctcatgcccctcatccgcgccgagcgggcccccacgtcgaccgacttcaaggaagtggccgctcatctgcagccgactcgcgactaccgcacagtgcggaaaatctacgagaagtacgtgaagggcgagccatggagcaagagcgggcccgccccggaacccaagcacgagcccatccgggtcaacatggagctccagaagctgctcgccaagaagccggatctgaccctactctctggctcgacatcaagccgtctacattctactccatttacaagaaggtggaggcgttgccgcctgaacggacggactactcccgtgaaaacccccagttctgcccggactatatgttccagtttcagctaccgcgatacatgctgcgcatcgaggcgttctcgttgacagcccttggggtgctggggcgcctcttggtgctgctgaagttgaaggtttgcatcacgctcatgctcgactggaggcagacgatggcaacgttcgagctgccgctcgtgaagaagctgctagccgagcagaagaaaggggcccaggtcaggatcctcgtgccgaaggagcggagcaaggttcaacacatcaaggcaagtaatgctctctcttaaagttgccttggttgtcttgtgttaactctgttattgcagttgattattgtggacgatgtcatgtcgtcgagtggatccgtcaacccttccttccaaggattgaaccggtcctatgagagcatcacctaccacttcatgcttgatgccggtaacttgtgatgtgttaactctttgtttgtgtacgtttgttaacctgtttgctcgatttcgctacatgtagtccggaaggatctcgaagagtcacaggccaaggaggccctgttcatggagatcgacgacgagtgggtcagggagcaagaggccctcaccacgaccgctaagcagctggcgaccgcccaggccagcgagggattcgcccccgaagagctggttagcgaggagctcgcgcccgaagagctggttctcggggagttcgtggacgaggaaggggggcgccatcatcgaggaagagaagaaggacgcggccgattacaacaggctgaagctggccggcatctgtgtgcagtgcaggactggagctctcgccgacggcgaaagcacgtgcatcgcgtgccggcacaagaatcagttccagtattatcagagacaggaggaaggcaggtgttgcaactgcaacaagaagaaacctgcaagcgacaagcacgccaggtgcgctgcatgcagggccaaggacgctgcttaacgaagcgaggctatccagtcgagagagtccgggaagtgcgggacgtgcctcaagcgaaattgcgctgaaaagcctgcagagcttggcggtgggctctacagtaagtgcaacctatgccgcaaacgcgcacaagaaagcagcaagaggtgcgatgccaagcgcgccgcactcggcatcaagagacagaagacgcccggacagtgttcacactgccacatgccgtgcgcgactaaaccaccgaagaagggcggcggtctctactcagagtgtgactggtgccgcgtccgaggccgggccaagctggacttcaacgcctcgcacgggatccgacaaaagcaacagcgtccacgccgacccggcaagtgcaggcaatgcgggaactccgcgaaggccagggacgggggagggttcttcaagtactgtgaggagtgcctcgaaaaagccccagagggggaaagcgaggtattgggagaagaaggcggcacagcgcgaggagaaggacgaggaggagaaggtcgaggaggaggagagcgcggacgagtacgaggagaaggacggagtcgtgcatttctgggcattgtagcgttttgcgcgtctccgagtgctcttcgaaagcactcggagttctttcgaaaaacacaagttgccggtcggacttggttccagtatccatgcgccctgcacgggaccatgcgccctgctgcgccccctcgccgcactggcgctgagtatgcccactgcaaaacacacggagatccgtgcaaaaacaaaaaatagccaaaaagacgacaaaaagacgacaaagccggcgacgatgatgatgataagtgtggcagccatggagatcggcgtggcgatgttgatgtccttggaggctgcagttagcgagaagtagaaggatccaagactcacgttggtcaggaagagcacgagcaggaacaggaagaactcgctggcgtgcgagacgaacatccagtacacgagcgtgccgaagatcagagtctcagccacgcacagcggcagctgactcaccgagttggccagcacgtacgacgacgtccggaagaagttggccccgcgctgcttgtagaagatgtcgcgagccgcaataaacgtcgggagctgtgacgcctgccccagcgacaggaagagcgaggccgcgaagatgataccgatgacgacctggatctccgttgggtcgaactggtagaaggacgtggcatacagcagccccatgacggtgatcatgaggccgcgcccgaagatgtacggcttgtttcgcaccgtgatgaggacctggcggtgcagcagcgtcctcgtgttctcccagaaggactggtggaactgcggcatggggttcatgtgctggtcgacgtgttccagcagcgtcggctgcagcggctcctccagcttgcgaagcgtgtcctggtagatctgcgactcgcggaagacgcgcgcgaactcgctgggttctctagggtggacgtagttgcgtgtggacagctccacctggtactgaccctgctgcttcgtgcccagatccatcaagaaatccgccacatcacgcccagtggggcattcgaagcccagcgccgagaagtacggcaccacttcctgcatggggccgtgatacatgacttctccggcgttgaggatcaagatctcatcgaacagcgccaccacctcgggcgccgctgcagcagcgcgatgaccaccgtcttgttgaacttgcgcgccacactgcactgggtattgatgatgtcgaaggtggcggcgctgtcgaggcccgtgctgatctcgtccatgagcgtcacgtacttcatgccgaactccatctcccccgtcgtgacccgcttcttctcgcctccagagatgcccctcatcagcgcgtcgcccacgatcgtgtcctggcagtcctgcagtccgagctgctggacgacgatgtccgggtacttatcgaagagctcgcgcgcggcctccagagcgcgcgcgttctcctcctccgtgccgttggtcagcagctcctcgccgcgtcggatgagctctcccccgcagaacttgtgggcgaactcaagcgtctcgcggactgtcagaaccgcgaagtggttgtcgcgctgcgtcacgtacgccacgaactgcggcagttggtccctgacccgctcctgcgtctccccgttgtacgtgatctccccagtcagcgccacgttcttggccagcgggaagcggccgctcagcaccttcatgagcgccgacttgcccgagcccggctgccccagcacgagcgtcatggagcccggccggaagctgccgctcacgtccttgaggatctccttgcgcaccacgcgcggcttgcggccgacgccggcgaccgccaggcgcacggcgttccagagcgtggggaggccgctcgtctgctccaccaccggcacgtcggccgtcacgctcaggcgcttgaagcggatctccatgtgcggcagggcgcggcccagcgcgcgctcgagacacgaggccacgtactcgtgcagcgcggatggggcgcagtctgtgaggctggtgggggctgcgactgagactgctactgctggtggtggtggagcgtctttgggggactgcatgggccagaggatggatctgcagtgccgtggacgactgcgacctgcgaggcttgcgtggcacgaggcgaatcgggaaatgacggcgactgacgaagttgaagtgatggacggataccacgcgcgacagatggctacagttgtgagatggctacatcgttagaggatttgcgccgcgtcttgcaacgggtttgctcgcgacgtaggtcgccgtcgtcttcgacgcgttcgactcgcactatcctagctggctccatgtgctttgtgatgtcgagccgaacgcaggcaagccgtgcatgcactgtgagccccgtacccgctcatggtgggatcttatcgttgaggctgcaagaagtgcggtgcgacagagacaaaagttggagcgattgattggcaaattcgggggatagagtgtcatcgtttggtgtactggaggatctaaagcaccatgctctggttgtgtggcggtaccaccgtttcaactgaggttgcggcatggttgcctagctcgcctgttaacatgatcggtactggatgactacagatcgccgcaccactatctgctcgaccatgaatcgtgtaagcgacctgcctcagaagttgtaagaagtggataaggttcatagttgctaatgagatctgtgagtctcggtcttcgagtcaccgctacaccgtcgggggaagcacacagccgtagacgccggtctggatgatgacacacacggagccgtcgggcagtccgtcctgagcgctggggcagttgccagcgatggtgcccgagcatacgggtccggccgagcagaatgtgccgtcgccgtccctcgacgctgacggagaattcgcccgcgatgttgcccgtgcagttcagcggcgcgtcgtactcggtgctcgacgctgtgtcccagtcagagtacggcttgcacccgtagacgcccgtctcgagcaggtcgcagtacgagccgaactccaagccgtcctgctcgtccgggcagaggccgagggagttggagcccgcacagccctcgccgttgacgcagaagtagctgtcgatcccctggacgctgatctcctcctctccgtcgggacacgccgcatgggcaacggaagcgaaggcgagcgcgaagacgacaggcttgaacatggcgcagtaactaggctggtgggctggggtggtgggtagttgtagctgtagctgggcagattgagaagtgccatgcaagagcaagaggcatcgaagcaacgcgcgcggcattttcttctgcaagcagcaatagcttttgagacgttgacagtgcggttggttccaccagaatgccatgaacacatgagatcgagcgagcgcgtgaatggtactatttgaagcggccgtgtgataccttgttcaggtgtaccgtgatccatgggccgggtgaacgaatccagcaaaactatcacggtacactacatgcgcagcatagccagcatctaccaaagagttttcatagcgctgtagaatgtacattcaatgcattcattgcgaagccgccttaaggtggtaacttagcacgcaaattatactagttagtagtccgtgttgagcgcgagcgccacgccctgcagcacccagtgcgacgcgtgctcggtcgagtgcaggtccgcttcgaagacgaggccgacccccatggcattgcgccgactctgcgtgacgtacacgggcgtgcggaaggtgttctgcagcttgagtcggctggcctcgatggggatgacctggagaatgggcagctcttcgacgagctgcttgggccgctgcggtgcgaggcagccgcgctggaggtcccaggacgcgccctcgaggaagagccccttgacgaagcagccagacgcagtgtcgccctcagcagacgtagctgcgggcagctgcgagccctgcgtgtagctcgtgacgcgcgtgtagagcgtcgacttgtccagcggccagttcttggctcgacacgtcgcctgcaccagcgcggtgaggtacgactcggggatgcccaggcccgagagccacatgacccgcggatctccgtgcgccacccagtccatgtactgcctgaagcgcatggtgaagtgctccatccagctccccagcggcttctccgtcttggggcacagcgagcgccacagattcggcaaaaagccgtcgtacagcgcgttccccactgcgtccagctcgtcgctcatgccgatctcgcccacgagcgccttctgcaggtctccgagcgacacgcgcatgcgcgccgtcagcaggttccagcggtcgagctcctgcagcagcacgacctgcgtcggcgtgggggtgagccccagcttcttgcggatctggtccacgtccaccggttcgggcaccttggactggatgtcgcttgcgacgttgccgatgtgatcctcccgcgagacgccggccccggactgcgccgaccgcggctgcagcgagatgaggtccttccacacgctcttggacatgttggtgtagtagccgatctcggcgttcgggtgcaggccgaacaccgcggggctgttggtcagcggcagcgtctccaccgtggccacgtagtcgtccagctgcagcgccagcggactcgagtcgccgtccaacgcgccaggcagaacgtagtcgaagcccgagcggctgaagtagaaccgctggcagtcgtcgaacaggaagtcgcccatgtattcggacagatacgtcgtgaggatgcggcggtcgtagtcgtcgctcacgcggccgccgtacatggcgtcgccgatgaggtacttgagcgagccccacgggagctgctcgtcgcggtcctcgtacgccttgtacaggtacaggctcagcagcttcctcgagatggtaaagtccgactcgttgaagtcgtagctcacgttccagccgatcttgccgtacttgcgccgctccagcaccaccgcgtgcaggaagcacagcacgtagaccaccgaccggaacgcggcgtgcgggcactcctcgagcatgctctggtccagcttggagtagaggctccgcatattctgcttgagcccgtcgggcggctccgtcacgaccttgagcgaccgctgcaggatgccaagcgggaaccggtccgtgggctccgtcgtgagccacagccggaagtccttgtgcggcttggtcatggccagcagcatcttctcgagcgtgcgcagccagctcgcgagcaagtggcagttctgcagcagcacccagtggccgcgcgtggctccggcctccagcatttgctcggccagaggcccctgaccttggccgagcgccaggaacttgaaccgatggccggagaacccgtactcgtcgcccagcgtctggatgtcgctctgtggatcagcgcccggactcaggatgcacacgatcggggacatcgccgcgctctggctgtagatgcgcgcgtagtcgagcaccggcggctgcacgaacttctcccccatcacggtcatcacgaacagcttcatggcgttgtacacgcggtcttggcggaagcagcggaacaccagcagcttctgtaggctcgacagcgtgtccgagtagccgcacgggagatcagccagctcgggcacctccaggtcgtaccaggccttccactcgctcgtcttggtggcaaagtccgacatcaacgagccgaagacgcctccgtctccgttgccttcgccgagtttgctgaggcacagcaggtctttccaccctgcgcccgacacccacgtgaggtcctcgggcttcggctgtgacgcggcctctagcgacgtgtcgcctttcaggaagaagtcgagctcggcgcgattgaggtcgcccgccgcactcatgatcatgcacgtcatctggaaggagaacatgagcttgtgccgctcgaagatgcccgtgcacgtgtagtcgtacatcatctcggtgatcgactgcaccatgaagcgcagccgcttctcgagcacgacgtcgcgcttcgccgtctcgagcgccgtgtggaagacggtgaggaaactcgcgagcgagatctcgtacatcttcatgatggtcgcgagcgctgccatcgcgaagtacatgatcgacccgcgcagagccacaggcgtgtacacttcgcgagccttggtgatctcgtccttggtgaagctggccagctcgagcttggcgctgatctccgtcgccttgttcttggtctcgtccagcgtggcaatgagctcctcgttgtccagaatgttgccggagctgctcgagagctcgcgcagcagcgtgtcttccagctccacgatgagctgcgtgctctcggacatttccgtgacgaggtcgctgtactgctcttccaagtcgggcctctcgtgggccaccacgacgttcagcaactggttggccaggccgtcctgcgtgacgctgtagttgacgatcatggtcttgcccatgacctccggggagtagtgcgggttggcgagcttggacgtgaagtacaggcggaagttggcgtcccactcgacgttcttgtcgccgagcttgatcagccgctgcgagccttccatgaacgtactcttctcgagcaccgggtccaagatggggtccagctcttcgtccacgctctcgaacaggaacgggttgccgaactgaatcgccagctccaagtgcttcatgaagtccgggtcgctcagcgtcttgacggtcaggctgttcttctcctccttcttcttgatccagttgaccgcctgctgctgcgggtcgatacacagcgggaagcggctcgccttcgtggtcagaatgccgttctgcaccgagtgctcgtccgcgggcaggccttccgagacccacttctggatggtcgcgtcgtccgtgagcgagttctcgaggcggaatggactcgtcacgggcagcttgcgagcctcgatgtcttggaagaagtcgcggtaaatgaggtccgagcggtagtcgaagctgaaggccccagcgtagctcaggaagctcgcagtgagcaagcagtcgcccaccagccgctcgctctgcaggttgagcgagtcgacgtccttcgtccagcgcgtgcgctccgagccgagacctgccaggagcttgctggccgcctgcagcctcttttgcatctggtcggcttgtgtcttcagcccctgcagctccgagttggcctcctggaactgcgtcgacaggttatcgagctccgtcttcaaccggtccagagtcgctttgaggtctgcgagctcctgctccttgatggtctgctccttctccattgacttgaccttcagacgcagcggctcgacgttcttggcgacgtcgtggtacttgacgatggccacgacccacacgagcaaacctgcgccggccttagagatggacttcatgttctcgatgttgaggtccgggttcttgaagaacgtcttgatcttggtgatcatcttggacgagatcttgtccttctcgtactccttcaagagtgtgatgaggttggcgttgctgagcatgaccttggctcctttccagtcgagatccagctcttggcccgtaggtttaaggatcaacacgcacatgcacaccgacatgaccaatggcggcggggacgcgaacgatttgagctccgtcaggtccgccttggataaatcctgcagcgctgcagcggcggcctccacagctggaagagcctcgagcaacgcagcgtcggcctcttctttctctttagcgatgagaacggacgctttctcgcactcaatctgcgtcgcggcagccacttcctgctgcttggaagccacggccgacttctcctcgatcgtcttgatcagagcttcgcacgcgagcgtcttctcgtccacaatgaccttcttctccgacagctccacctgcatgacgtccacggcttgagccgcttccacgagcttcgtgagaccgcccttgagacgagcgatgcttgccgtgaccttgactttgttctccttgagctgcagtcggtagttcgagatgaagtcgaggtagttcttgggcgtcacgtagtagtgtcgacgcagctcctcgccgaagcgatgggccacgcgcaccacgcgcaagtgcgcgtgcaccaggtgattcgtcacctgctcgcgcgattcctcggggatggcctcttcggccaggaagtactgcgccacgttgcgcagagcgtcttcgggccacgcgaagaaccagtcgatcaccgtagcagacacgagaccggggaagttgcggcagcgggtcctcagcgtactaccggaaggcgacatggccaggatcacgtggaggttttggcgacacagattcacgtagaacctccagcagctctcgttggtctcgaccagccccgcagccttcacctggtctcggacggaactcgcaagggcgtcacgctcgtcggtctcgaacagtgccggcaccacgccagtggtgagcatgttgttgataaactcgaggaagccttcttcgactgcgtgcgcgtccgtgaagaggaagacgacgggcttcttgcccagcatgcggtacaggtccttgaggttctctcggaactcggcctcgccatagccgcgggtcaggaagatctcaaacaggtcgtacccggcggtgaacgccgccagtcgggacaagctctgcttgccgctgccacccacgccgatcagcaacgcgtggcccagcgggttccggataatacgcaggatgcgggacaagtgctccaacgccatctcgaacagcaccagagtcatgggcttgttgtccaggttgtacgtctccaacgcctcgtcgaagatgccgcgaatacggcgatacgactccatgtcctggtacaagcgcgcgtcttcggccgacgcctggcccgtgatgcggccaatgcagtccgcgtagtcgccgaagatcagcgggtcggccgatgccacctcggcttcgtcggggaacgtatcacgcagtatctgagtgatcgcgccgtccaccagcgcgttgtcggactcgctcgtgagccggtcgcagaagattcgcttcacctcgttcctccagagcctcacgatcttgccaggactgtcgaacttgtccgtcgtggccatgcagatcccttcgcagacacgcccgagatcgcggaggttgaagatgtagtggaacttggacggagtgggtggcagcttctcgagcgtgaactcaaagaactgcagcagagcctccgtcagcttgatgcccttggcttggatcggttcactgaagttccgcagatacgtcgtcacgatcgagccgtagatgtgcttgagcacctctttcgttggaggcgtgaggttgtacacgttgaactgcgccacgaaccgagggtccacttggttccgaccgccgccgggaggtcccatggcgccgatgaacagcaagtctttgaggatacggagatccagctccttgccgcggtcgtacatgctgccgcggttcatcacaaagtgcaggagcgcgatcggctgctgcgttccgtagagatccaccttgggcatgttcaggtcgtcgatgaagatcaagagcttcttccccgctggagggccgtaaatcttgccggaccgcttgtcgacgttcgcttggatgttcgtctggacgtccagactgctggttcgactcgagaagttgatactcagcgtcgagcacgtttgctggtccaggtcctggaggtagctctggatcgtcacggtcttggccgtgccgctctcgcccacgaacaggatcggcttctccgtgcgcatgcagctcgccaggatgaagctatacagcaccgagtcggtcgtgggcacaaacacgcgcgagaagttgaacggagccggctcggcgtacggaaccacgcgcgactcccaaggctgccacttgcgggtctccaaatcgaagaagttgtagtagaggctcgtggccggcagggagcagtctgcgatcttgcggaggaactcgttaaaccgagcacggctgctaccgagcagcgcagcgcccagggaccacactacactgaacaagaagattccttcaacgctcgcacggtccgacgtcggatccaacgagccgtccgtgggcaggaacgcgtccaacgagatgcagagctgcttgcacatttccatgttgctgatggggatcacctgctggcacttggccacgatctcgtccgcgccgaagacgccttccaggataaagtcgatgcacttgggcacgtacttgtcgaacagttccagcaacagcgtgcgttcgagtggggtggacatcgcagtagatccaggaggcggcgagttggggcccggaggggtatctgtcgagacggggactagcgggtacttcttcttgagccaccgctcgtagtatgggcgatacccgaggttcttcgggtcgacccagaccatcccgcagcgactgatggtagctggagacgcgtactggaggtcgaacgtctcgcagatcatgcagcagtgagtctgcagccgaatgcgctcgccgttgggcagcgtcagcagcttgttgtcgtccatgacgctgttcatgttctccacccacacggcgtcgacgtctccgtcgtagatgagccaccgcttctcgttctccttgccggtggggagaggctggttgagctctcggaagagcttggacagcacgccgtccgtccagtcacgcgtaacggggtccatcgtgccgtagagctctgcgatcggctgagccttgggattcagcacgaagatcttgacttgctcgtccagagccgtcttggacgcggccgccagcgtattcagcacgagggtcttcccaccgccggtggggccgacgatcatggtcgtgtgccgcaccagcatggtctcgtacatctgaatgatcttgtcgatctgctcgttgtacacggcagggttggtggtgttgtactcgccagccacgagctctgcctcgatagcgtccttcagcgctgcgtaccccacacgggggcagtccaagccggggaacaggtcgttgatcagtccgtggaacagagggacgtcctcgaacacgaacttgggcatgttgctgtctcgcagcgcgcgcatgagcaccaggtcctcgttcatgtcgctgtactcgcgcttgagcgaccccgccatgaccagcacgctcttgagcgcgcgcagcccgaagtcgtagtgatactgcttggaaagctgctcgcgcgagagcttgtacagcaccgtcatcttcttggcgagcgagacggcgttctcgaagccctcggagaagagcatgatctggcagatctgcagcaggtccggcacgatcattgtcacgggtcggaacagcgccttgaggttgtctggcagctccgtgcgtccggcgtatcctggattcatcgtgatgaagaacccgcaggtggcgaagccagccgtgcggtggatggcgatctcctggccaaagccaatgtcgacggtgggtttgtcgtagttgagcgcgttctggatcgctcgaagctgggccgagaccacagacagcacctcaatgttgatgcggttgaactcgtcgaagcagccccaggcgccgacttggaccaaccccgagaagatactccccatggccttgtagtccagcccctcgccgcaattgatcacatagcacggtaacgcgagcgacttggccagatccttgacagtctccgtcttgcccgtacccgcagggcctgcaggagagcctccaagcttaaacgtcagcgcctgcgttagcgtcatgtagcatcgatctgtcagaggcgtgatcaccagtcgcccgttcaagcccatgtactcgtagccgtagcggaagttgcccgtgcactggctgatgacgacgtcgtccacgtccttcctccagtagaaccggagctgcgactcccaggcgaactccttctcgttcaggatgctgtctcgaacgaacgagtcgacgatgtcgcgcgcgtgcacgtcgatgatcagcagcgtgttaaccttcttacgcgtgagtttatccagcggctcccgcacgcgccgcacgagactgttgagttgctccgtcagccgtccttcaaggcccttcatggcgtacttgtcgccacctttgactcgatggaacacgtcctcaacctcccacgtccaccagatctgactgcccacgagcgacaccatgcccagcacctgctcgagccacttggtgcggtccatgttggcgtactggaacacgccctccttcgcaatgcactgcagagtcactcgcatttcgtcttcgacgcccgtcatccacgactcaacggggccctccacagcagacagcgtgcggaactggaagccttctccttcggcgctctccatggcgccgacgctcttgttgttgcgtacgaaggtcaacaacttgacgttgtcgaagagcttgagcatgtgaacctggatggacgtcgggtcggaagagcccaacacactgagcagctcgtcgtcggagatgaagaagaaccgcgggaacgagttccgcttcgtgtcgaggtagtcgctcagcgacttctggcacttgtcgagccgctcggacagcgagtgcagcgtctccagccggttctccgctgtgcaggcttccacggcgttggcgttcttgtaggtggcgcccatgatggtcttccaggccttgtcgatcgcgtcgaacttcttggcctcctccggcagctgctggcgaatgtcctcggcgccgacgaaaatgctctcgaggtacatccacttgcgctgcacgacgaaccagatatcgaggcactcgttcacgacgcccagacgcttctcccacttgcggacgcgctcggagaagttggcgatgaagcgcgagcccgacatggtctgcaggttgagcatgtggtcttccagcgtgatcttgagttcgtcggcggcgcggagcacccagccgcggtcggtgccgttcttcttgtacttgaccagctccagcgccgccttggcccaggagtcctcgatcttgaggatctcctgctcgatcttctgctcctgcatggcggcgttcacgatctcctcgatctccgtcgagaagcggtgcagcttcatgacgaacaggttgcccagcgtgaacgtcttgaggttcatctcgaagcgcacctgggtcacggtcatgagctcctcccaatggcgcggcttcatggcctcgttcttgagactctggatgagcgggatactgtccttgaaggccaggatctgcttctccacctccacaaaagtcgacatggccttgaggtccttggggatcttacgacagcgcttctccagctcctcgatgcctttgttcatggccgccacgtccagctcggcccagagcatactcgacaggttgctgataaactccttctgctccgtgtagagcgcgtaaatgacctgctgcttctccagggcttccgcgatctgctgcagctccgggtaggacgtgatgaacaaggcgaagaggttctcagcgttcgcgagctcttgtcgtcgggccttgaacaccgtgagcttcttctggaagaccgacaccagttcgaggcccgcgtccagatcaagcgagcacgtgcccggtcctcgctccatgaactccttcttcatcgccttgcagtcctccgcaaagttgatcgcgtcttgcttggtcacgcctcggaactggtccttgaccttaacgaggcgtaggtccttggttttggacgcgaggaagaggttccgccacctctctttgagcgagaaggccttcttgaactcggctgggtctccagcgatgctgaacgtctgcaacgtgcggtagcgctcgatgatgtccgcgtactcgagctccatctccatgcccatgtcgctgatgctggccaccgtgttgagcaccttcttgagcgaatcgaggtcttctggggtcgcgtccagctcggcctcgagctggtccatcgtggcgctgatggccacgagcttcttgttcgacacctcgaggaggatcttgccgtagtcgtccttccacatctcggcctgcttggcgatggcgatggccaacgggaggcagttgatctgcaagaagtccgtgtccttctccgtgggctggttgcggacggactcagccaggcgagtgtactgcgccatgcgcgtgtcaaagtacacgcaagggggcttcttgtccgccagcttctcgagcgcgcttcgtcgcttggtgttccagaggttgtacacggtgtcgtagcgccgccagctatccaggtagcggttcacgatgttgaagaccttgtggatctcctggttgagcgacagcgtcatcttgatcacgtacgggttctgcgagatgtccgagtagaaggtgaaggtgatcggctcctcgtcctcgttcacgatgagcggctgcgtctctcgacacgttccgtgcatccagcggatgaacgccttggcgctctcgacgatgtgcttgacggacttgctcaggtacttgtacatgtccgagagggacggcgtcacgatgatgtctttgccgttcatggtcgccttgaccttgcacagtggcgggcgcttgagcttccctccttctccaagccccatgaccgagacggcgctgctgatgtccttcgtgtgcacgttgagcagcgcctggaacgtcgtcatcgacgcaatgatcatcttggtgatggcgttgaagatgcggcgctcccagtacatgtagtacgtcgacatcttcgggctagtgcctgtgttcacacccgcgacgatctcctccaccttgatgagcagaggaccgatcgagcggtagctctgcacaagctcgtcgatgcgctgcatgcggttgcgctcgacgagctcgtagaactcgcccacctccgtcacgacaccttcctcgaagtcctcgatcttgatcagcagcgtgttctcgatatccatgacgatctcctccaccatcttgctgctcttgtggatctggctcacgaggttcgcgaactggttcagcgacttgttgcagttctcgatgaagctcagtacgcgctgcgagttccagttcagaggcgaaaagcccacgcgcagcacgtcttccagggccttgagctgtgaacgcaagaggtgcgtctcgaccggagtgagctccgccagaagcgcgtcgtgccgtcggagcatcagcgtcagctcctgcacgtactggtgatacttgtcttcttgcagcgtcacgttaagcgcctcctccgggatctcaaacccgaggcgatcaaggtacttcgactccttgatgatcatggccagctcgggcgagaagttggcgtagaacggcggaggaggcagcttgtacagcatgacgccggtctccgacttgcccgcctcaatcaactttgggccgaggatcgactgcttcaggcactcgttcgtcagggcgggcaccttttccttccagtctttgtggagttgtttgatgtaggcgtccacggcgcgtgcgaagacgagatacttgtccttcacctcttctccgtgcgggctcttgagcaggtcgttcatggttcggaagcgcagaatgggcttcttcgcgcgcaggtagagcgcgcgcgaccagctgatagcgcctgcaacgggcgggtggttcttgtacactggcggccggtgtttgtatcggtggaactgctcctccagcttctctagctccttggtgtactgcatgaggatgtccttgtacttctccatcatctgcttgttgatggactcgcgcgactggatgttctggaagttttgcagcaggtcgaacgcgccttcagcagatcggagtttctggaacgacgtgtcaatgaacttccgtgtcatgtgctcgatctcgctcactttatcgcggaactggaccatgacggactcccagctcgtcttgtagccgcggtcgaagatcttgaacgggacgctctcgaacggagcgatgagactctcgacgcgtgccatgacctcgtcaatcccctgggagtccccggtcacggacttgagctcgggtcctaggaatttgttgaattggtcaagcaccgtcgccacctcttggaggttttcacagatcttggccatgtagttggtttgctcgaacagccgcttgcggtcgaactcccagcggtgatcagtcccgctggcctcgatacgctcgcgcacttttatgtacgtggaatgccacaactccagcaccatcttcgcctcctcaatggcgtgaagcgcattctccggactcttccgtaggatggtgtggacgttgatctccactgccactttgtccacgatctcggacgcgatgcgctccatcaacggcaccatccgctcgtccgtgttgtagtgcctcgagataatccagaccatgcggatagcgttcatcatggacggcagtgtatcggcgatcgcggagaaagagccgctggcgatgttcttgaagtgacgctccaaggtcgtgaggaacttgacgttgtccttcgcctccacgtagagcttgctcagctctgagaagtgatacttgaacgtgagcagcatgctcgcctccaccagttccagcagcttgagcattttctggaccgtgggcatgttaatctgctcgaagatggtgctgagtgtagcgttacgctccctccagaactcaatctcagcgagtggccccttcctcttgggggtcttccgggcttcctgctccacaacgctggccacgctcttggaccattcttcgagcgcctgctccagcgtgttaatcagctcatagtcatccagatgcgactcgggcttggtgatgacgacgtcggggatattcaagtggatgtcgccctgaatctgttgaatggcgttcgagatctgcgacgaaaacttgaccaagttgctcttgaactcgttacgcaccgcgtcgatcaccttcagagcctggtgcgcagctgccgagttcttggcccccgcgtcgtcgccctcacctcgtccgttagacatatagtcggctcttgaaagctgcgggtcgagcagtggcatgaatacgtggcagatgatgccctccaagttcgagagcaagtctccagtcgagcagccgagctcgacattcgagtgagcgactttctcgtggccgtccgtcacgatattttgcactgtgacgggtcctgccgccaccttgatcaagaacacggtggaggactcggaggagtccgcgggcagcgtattcaaagaggcgtgacacacctggcgcgtagccgtccgcgagcgcttcaccagcctcttgaccgtctccgtctgcggtggtggagcctctgcatcgaggaacaactgctcgtctgtcggctcagtcggtgcttcttcactcggtgggtctgtatcgacaggagcataagatagaggtcgtgagtaagaccctcactcaaccagagaatgttgctgcctgatgatgcttacctgtgggtgaggcttctcgagtgacttcgacctcttcctccacctcctcttcaagctcgtactgctcctcccccttgaagaagaagaggacgctgccggcttcagccttcgcagaaaagaacagctgcactagatcagcagcaaaaggctcggcctggttgtccgcggtcttggttcctgtcaggagttggtcgactactgcgggctcgacatccaatgctcgcgacacgagccgccgcagccatcgccgcgtcacgtcgtccagcgacatggtcccgacctggcctcctatctgtcgtggtctcctccctctctctgggtcggatcggccgccgtttggctcgcgtcgtttcgatccgacgacatggtacctgatatccggtacatggctccagtctccccagattcgcagatcatatcaagcaaagcatggaggcgttctccgaggcggtgcgcgagtggcaggcgctgctgcgcgaggcgggcgaggtcttcgtggccaagcacctggacgccgccatgcaactggccgtggcgcttcagtgcgagcaggacgcagaggcggagcgcgccgccgcggccgtcagcggcgccgagctgagggacttcctggccctggccatgctgctgcggcgtctgctggaggcggccgtgcgcggccacatgacgttcctgctgcctgcagcggagaagaggacggagctcaagacggagctggcgaggcagcaggcgctcgttgagagtctgccggacgccttccagctgcgctgccggcagctactggagcgtcactgggcgacgctcacgcaggccgccgagacgaccaacttctcgctgccgagggtgcagcagctgcactggaaggtggcaacgggagacgacgctggacgccgcatcctcgtgcgactgcagacgtcggacggcaagacgcggacgattcacgtgccactccgacagttccaccagctacgccacagcgcggccacggtgctgcaggagatgaaccaggtggaggcgcacccgatgatgcggctcgcctacatggagcagagccggcgggcggacaccacttcggtctcgacggcagtaggggcgagcgtaccgtgagtaagagagagtgagtgagtaaagtgtgaagaacagtgagtaagagtgctcttgttgctgctgtgcgtggccgtctagttcttcatcttcttcttgctgttggagaagcactcgccccagaggcacacggtcttgccgcgcatgatctgcgagaaggcctcgaacgtgtaggcctggcgctcgcgcgcctcctcctccgtgatcttcttgtcggccacctgcgcctgcaccgcggccttgagcatgtccgagggcgtggccgccacgtactcctggaacgggtacttggcgccctccaccgcgagcacgcgcttctcggacgggatctggtacgtctcgagcagcaggtgcagcaggcgctccagctgctcctgcgtcatctcgcgcgtgtccgcctcctccttcttctcgtcctcgctcttggcgttgagcgcttcgccgggcggcgcgttcgtggccaagttgaagaggatgcgcaggcgctcgtccacggcgcccttgacggccatggagaaggccaccatctgcgcgtccacgtcgctcttgcggtcggtgtcctgctcgaggctcagcagcacgcgctccaggtggtaggccttgctcacgcccgcggggcaggcctgggccagcttgaagcccaggtactggtcgaagtgctgcatcgaggccttgcccgacgggaaggcgcgcgccacgccgccgcgtacgtcctcgaaggtctcgggcgtgatgttgttgctgctgcgcagctcccaggcctcgtagggcgagatcatggcggcctcggcgatgggcgtctgcagcgcctcgaagttcttcttgccgcgcgagccgcggtagatgtagcagccgctgcccagcaggatgccgcccagcgtgacgcccgggttgcggctgaaccagccgggcttgtacttgggcggctcctctccgctgccgccattggacgagtcggcgcccgtggaggaggaagaggtggaggaagtggaggacgcagaggtggcagtggcggccgcggccgtgtgctgcagacgccgcaggtgcgcgggcggcacgcgagctcgacgctgcaggcggagcatccttgggccggtcgattgtcgagtgatggtcgtgtaatagtacacgtagaaagcaacaattacaactacccatccgaaaaggtggaaacagttttggcgaaatgtacaatagtaaaatcattaaatgggagcaaaaaaaatctgctcccaaatgttggacttcgttagaaatacggtacactgtaccggctccgaaaggcacttcaacttgtaccactcagcagctcgtcgtcggtggcggctgtgcggccgagctcgtgccagttgtccacgtactcgtcgaagtcgagcgctgcggcccactggaacatgtcctcggcctcggcctcccagttttcgtcgtcaaagtccacgtcgaacagcacacgcggctgcctctccccttgtccgttgtcctcctcgtcctcctcgtcctcctcctgctcgtgctcgggccgatccgttgcggtcagcaggccctgcgtgtagagcttctgcatccacagccgcttcttgtggcggcgcgcgcgctcgcggtcctgctgccgcacgagcttcgagtagtggaagccgctcgcggtgtggcgcccgcctgtggcttgcgcgatggggtccgcgttggcctcggccagcactttggccgtcacgggacgccagccgttgttctccagtcgtcggtaccacagccgcgtgtcctccgcctgctgccgcgcgcggtagtacgagttgcccacgcggatgtacgtggtccgcacggactggcccggccggcgcttctcgtgcgagtggctcactggagccgtctgacgcgcgaccgcgtagtccttggggctgaaggcgcccaggtcgcacacgggcttgcgcgtgaagatcttgtagtagatggtgggcgggaacgccaggccaccgaggcggaaccgcacctgggcgcccatggacgcatccagcagcgacgcctccgacgggttgatggctcggagcatgcgcgctgggtcgccagtgctgcggaacgagagcagatcgcggtagtagcggaagatgcggcggtgcgtgtagctcttccagacgctctggatgcagatcgcggcgcggttcgcgggcgtcaatgcggcggatcgagcgccgcgagcttggcgctggtacagtttgtgctggtagtgcgccttccacgcgtactggagctgcagggctgcgatgtggtacagcgggaagcgatcgagtgttccgcgccagcgcagatgctccatccggaaccaagcctgcagctttgtcgccacgaagttacgaaagccactctcgtcggagaagctcccaccgcttgcgacgaattgctgcattggactgcgaatgcgagccttggccttcttcgtcgtgtggtcatttgccggtcgatttgaggctgttttcgacgagtggcgcattcggcagagcatacctcgcacacgcttctggatgaggatgaccgagaggttttgagctgccatcgggtactcccacggcctcaagatgatctcctgcaagaaaacaactagaatatgagcacctgttcataactctcaagttgtgctgtgtgacgccgggacgcactctcttctcggcgcgagacttgcgcatgaagagtgactcccacggcaattggcgccggatgctcttcgtgcgcctggtcttgggctcatggcgcgttcgaaacttgctggtagtgcatcatcgagaatcttcagacaatgagctccactccacacacaagacgacaagagaagatcgcacctttggtatcgcccgtgcttgaagccaagctctctcaatcgcttcaagacgtccattgctgtctgccgctcgtctccaattgcctctgcctgctatagttcagcagtggtgaggctgaagtcaaacttggtacttcttcttcatcttgctatttccattctcctgctatttcgatgcgagcgcaacttcacgtgtcttatcttgcaagtaggaacgcaaactgccttcgaaatcccgctgggagacctgaacgtatctgatggatgaacgagaagtgatcgtggcgctggcggaagctctggttcaagtgcgcgcacttgacgctgagcctcgaattccgttcactactgtccaccgcgccctcgaagacgtcgaacgcctcatcttccaccacaaggagcagttcggcgtgcactcggtgcatttccagcaaggctgcgaggagtttctactgctgagcaacacgctcgcgatgaaggctctgcagcgctcgacgccggaggatatcatcacttgtgaacaatgcggcgacctgctccttcgagcagagcagcacactcgacacacggggtacctgcgcagtatccctgaagcacaacacactaaccaccggcgcgcgttccgcctcatcacgctcaacaacctcgcctgtcacgccaagcacacgggtaagcccatcgcggcggtcagcttcctcgagcgagcgttgaagctgcagatcaagtctcagggcaatgattcgagcattccggaccacgagatcgctcttaatcgactcaacctgtgtgctgtgctctcgcagctccaccgccacgttgcagccgctgcacacgccaaagcggccgtggcgttgctgtcaaccactgaaggagacagcgagaatctaagcgccgaagtctctcagttactgctggtggcccactacaacttcgcagtggagctggagcatctgagcgaccacgacgcagcatggcggcagtacgagctcgtggtcactgtagctgaacgctaccagctccagagcgacctcatcgacagcgtgcgagccatcctagcccaagggtctctgagacccagcagtaaatcgcctccaagagctcgaacgccacgagaactttacaaaccgcagcgaagacctcagtcccccaagacattacgcctcgctcaagcatgagagcgtcagccataataataataaaatgagcgttcgcttggtctcctcggagtttttcttggtcgaagtatttttgagcttggctgcgtgcgatgatgatcaccgcgagttcatttcggcgcagacaaagtcatcatgagtgtcgggagtagcggcgacgagctcgagacgcctggagttccgcctctttatcccggcaacaactcaccgctcgatgagacgcttactctgagcatcggtctcgttgccaagtccaccgttgacgccgtcgttcaggaagcagtggaagctttggctcaggctgttgcaggcgcgacgcagtggttcgttgacgccgcgcgtggagagttcatttcccaggcggtgatcactgctgaccctcctgaccctgacccagtcgaggaggatggcaaacatgccaccgcttctccacctgacctcgttaagccgttgccgctgttgacccgacctccgagcgctgttatccacgcggtcgcgaaagcgacagtcgatgcggcgacacaagaagcggtcaacgaggtcgtacgagccgttgagaaggccaccgagtggatcacccaagccgtggagaatgaactggtgtccgaaaccatggaccctgacgagggcatcgccatccacaatgccaccgagtggatcgcccaagctgtgcgcagtgagctggttgctcacgctgtggctgacgcctctccgtccatcgacgccgctatcgaggaagatgaagagcctccggatactccagaagttgtgcgtgctcatagcattcctcggctttcgttccaagacgatgttcccgtcgctgccattcgagagcttgctaaagccacagctgaagaggctgtcggtattgcatgtgaaaacgtggctcaagcaattggccttgccagtacatggctcgcccaggccgtccgtggtgagctggtcgcacaaactgtagcagacgcttcaccccctgatcctgatagcactcttccagtcgttgaggcagataatatttcggcggactccacggacttgcaagagcgaccacagcagcaaccctctccatcaacagaagaggttgaagaatcggtcaatttgccggcgctccaactacccagtgcagcacctgtgtcctcagaggttgtggccgagctcgcgattccgtttgtaaacgaagttgtagcgtcggctctccaccaagcggttcctgtcagcccacctgagcctcaagacgaggaggtatatgacgacgactacactcccatcaacactccaaccgctgaagatgcgccgacacgatcgccattgccgtcgacgcggtcaccagaaccagaaactccgtttgtgccgcctgtaatcctctcagtaagagcaaccccacctgacaaagctactccaaggtaagtttccaccgctacctgctaactgcgctcgcttgaccactaaccgttcgttcaacggcagacggaagagcccgattacgagcaagcgtggactgggaacggcaccatccacggacaactcgccgtcttcagcacctccagctgtgactttaggcgacgagcgatcactttgttcggagccagagcccccgcaaacaacattgccaccgttggttctacctggaattccaggagcaccgctatccggaagaacaaagcttcaccatcacaagacgcctcgtaaaacaccgcggttcgatgaggccatattcgtgagtgacagctcgcgtactccctccaagacaagctcaaggctggaaaagcacacctcacaatcctccattgcagctgagctcgagttaacaccgctatcctcggcacgtgctgcagcactgatctatgcccagccgcctccatcttcacgtcaccaccaccatcaccacaagcccaaaaagctgcgcgacgcagcgtcacagacgtcgccaccgccatctccaccgcttccaactcttcccccacaacctttagtcgcagttcacaatgacagtcacaccactgaattgaccaagacacacacacaccgcttaaagcactcacctcgtgatggatcgtcaccagaaaatggagctgacaagaaggcggatgggggcagcaacaactccctgcttgctccacttacgaagacgccagccgcacctccctcagccgacgccagcccaccaaaatcgtcgagtccttcccgaacgcacaggaatcacgcgcatggacaccataaagcaggcggcggtggagccggtggcggcagcacgtcaccgaacaaacgatcgggatactgccagaggtgtgtcttcgaaggccggtcctgcaagatcaacgactgcctcaagcaccaggttctcaaatgacaggagacaactagctgtaccaaacaaatccattagataatacgcaagaaaaggagacgctcaccaacacgaccactgcctcaggacttgtgcacgcgaagcgtgacgttgctcttgttcttgtactggtctaaaccagctcgaacagcccttcgacctcgagctcgcgaatacgtgcaaggtttccctcgagcacgtcacggtccttgtgcgtgagcatgatgctgccaggcgtggtgaacatgtccaccgtctggcgtacgttatctcctggtgcgacgaagatctccttcttgaggaaggcgggcatcttctcgatctccgcgatgcctggtgtgctcttcagcacgccgttcttgtacgacactagcatggcctcgcagccgtacgccagaagtttcctgggtcggtcggtcagcttggcaaacgcttcgccatctaagatactgtcgacggccgctgacacttgattgtagccgacacaagtgttcgcaatggggacccatgctccttcaccaccgtggcaacgagagccaacctcgatcaatacaggggaaccacggcagaacttgacttcaccgtgagcaggtccgttgcgaatgcccagtgcatctacagtatacataaacacaacgtcagagcgcttccttacaccaaaatatcatactaaagtcaatacgcaccaagcacttggaactggtagtcgatcatgtcgttgacgatgccctctgcaggcaccaaggacaggccgaagtacacaaacgcagcatcgttcacacggcgcttgtcgtacttccagatagcggtcaccttgtgttcgccgttgcggctgaccgtatccaccacgtactcatccccttccaggtactcctgcagcagcacggcctcgttctgaagtcccagaccgttgatcttgccgagaatgccctcaaaagtgcgcttcgcttcttccaaagacaaacagagaaccacgtcctctgtccccgcgctctccagtggcttcaggaccacctcgaagggctccggcttcagatcctgcgtgatgaaggcttcagcctcagcccacgtcttcgccttcacctgcttgacggcacgcacccccgttgcacgcagtgtttcgcccatcagatacttgtcacgacgcgcgttcgagtgctccaaaacgttgccctccagtccgagcgcatccgtcaacgcatctgacagcttaacgcccagctcagcaccagcgaagacggcacacaccgcagcatttgtcttagcgccctgcttcttcttgttctgcctgtccgcaacttgcttggctgccttgcgaatagcgctcaccgtctgatccaagttgccttcgtacgcaacggtggccgcaaactccagtgtcagtccttccgggaccaggctcgccacgctctcgatgttctctagacggtcgctgtacacgcaaatgcactcgtagcctcggaccatgagctcgtgtgccagcacagcacccgtagagaacgggtccacgaccaccaccgtgccgcgagctccttccggctgcgcctcaacttcttcttcgggctccaaggcatacagtccctcgtgctccaactcgcggatgcgcgcgtagtcccggttcagctgctcctcgtcttcgtggaccataatgacgctgccgggcgtcgtgaacatgtccaccgtggtcttcagctcctctccagcatgcgtgaaccacatcgtagacaccgtagacggcaggttctccagctcttcctggcctgggtatcccgccagctttcccgtctcgtacgacaccagcatcgcctcgcagccatgcgacttgagctccctagggcggtccggcaggcgctcgaacgcttcgacatctaggtacgagtccaacgcagcatccacgtggttgtagccaaggcagggcatcacgataggcaagtacgagcctgagcctccgtggcagcgcgagccgatctccacaagacacggctcgcctcgtatcaccttcacctccgcgtgcccagggccgtgcacgatctccagcgcgtccaccaccttcagcacgtagtcggccaccttggccagcactgaatcatcaggagctgcgcgcagcagcacgccgtagtacacgaacggcgcgtcgttcacagcgcgcttgtcatactcccacacagccacgaccttggtcacaccgttgcggctgaccgtatccacgacgtactccgtgccgtccaggtactcctgcaccagcgtggcctggttctcgagccccagaccgttgatcttgccctggatgctaccgaatgccgcgcgcacctcgtccatcgagcggcacagcgtgacgtcgtcgctgccggcgctctccacgggcttgacgatgaccttgaagtctccgcccttgagcatgggcacgagctccttcttgacgaagctctcgacctgcgaccacttggtggcctgcacctgcgccacggcgcgcaatccggccgcgcgcaccttctcgcccatgaggtacttgttgcggcgcgcggccgagccgctggtgccgttggtcgtgagcttgaagtgctccgacagcttgtcggccagcagcacgcccgtctcagcaccggcaaagataccgagaatgtccacgttcttgacgcggcgcagcgcggccgccgtgtcctcgagcgcgcgcgcctcgtccttccgctcgacctctccgtcgtggtagatgatggccaagaactgcgaggccaggtccttgggcacgtgcgcgatgcgctcctgcgtcacctcgagcgtgtccgagtacacgcagatgcagaggtagccgcgctccatgaccttctgcgccatggtcatgcccgtcgagtacgggtccacgaccacgacggcctcctggcgctcgcgctcgccctcggcgatgcggaacaggttgcgctcggcgctcgacaggctcacgcgccgctcgcgcgcgttgaagtagcggcggtgcatcacgtcggacgccgtcaggagctgcttctgcgagcgcaggcgcgggtcgaacgtggcggcgcgctgcagcggccggaagcccgacatggcgcccagcccgagcgtcacgcggtcagcacgcgcctcggcgccggtgcgcaggtgcacgcgctcgtcgaacgtgatggcgcgctggtcggccgagagcacgcggaaggacggctccttctgctgcgctggctgctcgggcgtctcgggctgcttggcggtgctgactggcgccggcgggggcgcggcggcttctttggcggcggcgttccccatggtctgcagttggctgggggccgatgagtcgatcgatgtgggcgcgggccggcggatttcctactgagctcggcccggcgaggaatgctcccgccacgcacgcacgtcccccatgcgacgcgccattggccgccgagaggccgcgggcgaattatggaaggatccgcgccagccactcatcagtgacccaagcagcagcaaggtgctgctgctgcaacaaccagacctgatggaggcaagtcgacacgcaccgctgctgtggagacagaagccatgtcgaagctggtgctgctgcttgaagcggcggcttcaagttaaacctggagctgccccatcgaaatgcgcgtttctgcaagagtatcttgtgccactcggatttgtcgcgtgctgagcagcgttcgcagcggtgattcaagatgaacgtcaaggctgtacatgtacatggctgttgccaccaccacggctgccgctggattgtcgacgcgacaagggatcagcaggacgtgccgactcggcactgccgacactgatctcgacggcacgttgcagttcggaagcttggcctcggagcccacggtccaagtttgaacgctccctttttgcgggaacaccgactcgtatctgtcattcaatgactcattgcttccttgagcgcagctcctcatccgagcgactccgagtcgccaccccaataccctgtcaatggttgcagctctgttgagtccatgaaccgtcgactcgagcgagcgttctagagacgggctttgctcgcgtgacccgcccaccaccttcactctccgatttgccagcatggcgacgcacctggcgcaccgcttgccgtcgtccacgctcggtgacatctacatctcggtgtcgtcgagcgagaacggctacatgcatacggaggcgatggagaagcaggtggcgcacttcgctcgctgcctggtggacgcgctgaaggagttcgcggcgacggacaagcggccgccgacggacgaggacggcaactcgttggacccaacgatgtggggcatccagccattcggcggtctgggctacacgggctactactacagcctgctcgagggatacgtgcatctgaatctgctactgctggatggggacaagtttctccccattctccagcgaggccacagcgaggcgccgtacttcatccgcctgctctgcggccacatggacggaggccatgctgagtggattgcgagacgtctgcagccgattatgaacgacgagtccttcagtgacgtcaagccgctcaatgctggcgtgctgcagacgattcgagaccactgcgcgctgctattccgctgcctgtacagcatcagcggcgagaacaaggctctgggccccgagttcgtggcgagaacgatagccccgttctgatggctgcccgttcacctggggaggatgccgagcttttgtttggtggttgtacgccatattgagaagcgaagaaagctaaagctagaggtattctcctccataagtcattcgacatgctgctttgtttcattattttgttataggcgtttgctttttccatcaagccctagaaatacaagaacgtacgcaggttggcacaggatgcagctcactgggcctccggctcgcagaggcgtcacttactcactgggactaataaatatcaagaggggggcttctcgtctctctctcacttcactcactctcacgtccactcactcgcgcccgctcaggacgcgcagcgtcttcttggtcgtctcgtacgtcgagaacatgacggcggcgtacggcacgatgcgcgccaggttggggcccgtgccgcggtacagcgccagcggaccttcgtcgcggatgaccttgcggaagcagtccaccatgccgcggtagtatagcgtcgacgggctgcctccctcagccgacagtggccccacagaggacacgttcaggtgcacttgctgggactggagacgcttcttcaccgtgtcgaagggatacgccaccgtctgggcgatagccccggcgacactgccacagacgaagtagtcgagtccgtccatctcggtctttccctcgggccagcggtaggccggccactggtggcggatggctgtcagcttcatgtactcgtagcagccgaactgcacgccctcgaacggaatggcgcccacgacgccagaccatccgccacggtacaggccacgcagtccttcgcgctccaggatgaggcgcacgccctgtagcacgccgcggatctcgctgttggcagcggcgggagccgtcgtctgcgagatcattcgggtgcgcacgacctccagcgggtaagtgcccatggtagcgatgagaccggcgacggcgccgcacagcgcgcgctgccagttgctgagctctcggccctccttggccgcgaaccgcgactgcagcgagtcgtacaggtagaacttgaggcccgcgtagggcccgaggcgacagcagccggcgctgttgcctcgccagaaggcgcgtacgccgtcgagcgcatacagctcacgcacggtgcgcgcgatggcggaggacgccgacggccgcgaggcgacggcgcgcgcggccatgagtgtggacggcgtagacatagctggtctgggggacgtcgtggtggtggccgcagcgacggaggcctcggcggagcccgcgggcccgttgacttggatgacgatcttgagcacgtctagaggcgacgtgcaggagcgcgtgacgcagccggacacgacgcccgcgacgatggtctcgagtccggagttgcgcggctcggttggcgcgttggaggcggcgataggcttgggtctccccatggcgatgcacgtcccgggctggtggaagtcgtcgtggccgcggcggcgctcgtagcgtttgatctgcggagctctcggccaaagtcgaagtgaggattcggccatgctgatctttgcgacgattcgcgaaagggacaggctccgacgacccattctcggccttttgcgcccattttcagtcataaacaagccattgttgatggagtaggacccatttatgcgactgtgtgctcattcaacggcttcaacatgcccaaacgctttatttagtgcccatttcctgtcaaacgcgcatcttctgaataaacggcggggcgacgtgcgccgtctcgattgaatcgcgggctcaaaaccgtttttggacgagcgtgtcttccctcccggacatgcttggtactgcttgcatattgaggagctgagccgcggcgcctgtaggcctctccatcaaatcctgccggctcgggtggtggcttgttcaaggtgagaggctctcactgagagctgctcgcaaactcggctgcgagaaactccgatcaagccgagcacagggttgcgcgcgtggctgtgttaagtgagcctggttgaagttgcctataacggccggtggtcgtttcgctgccattattgtcgttgataaggggcaatgctagtggcgtttgctgctaacgttagctctccgcatttggtccagcgattatcagatcctatcgagcaagcgtgcaatgctcgctagcagcgagtcgctagtggcgctgcttgctcatgctgcataggagcagcagtacacgatgaacagcgacattattatcgacgaggaagaaaaatctcgtcgctgtgaagagggcggtgtgctgggtccgagcagcgacgggggaggacctattgcacctcccgaggcgatttgaggtctggaatccagactctggtagtatgacgaaccgaaagacatgcagcgtgagcctggcggcgtgcttgcgtgaacgacatcgctttattagttgtatttcgcttggatgataggcggacaatgcgttagctcgcaggagaaccaagagctagcgcgctttcatatgatcgagttcaatcaagacccgatgaatccaacgtacgctacactgcactgcagccgtagaagcagcagcagcagcaaaccgcccaataaaaaaaaagaaatcgacggcggggcgaacaggagacaaccttagtggcagtgcggagtgtatatcgagacgcaatacgttcctactcggtcaaagctgccagcgtgcttcttcagatcaaggcccgaagagcgtatggatacacccaacacacactgcactgcaggcagcagctaccaaaaaaaaaaaaactcggcggcggggcgacatgggcgcagcgttagcaccagtgcgtagtgtatatcgagacccgatacgttcctatacggtcaaagctgccagcagcaccttcacccaggcaggcagctcactgcttcattctatagccatctgcaaacaacgctacatgtaatgattcattaaccatcgctctcccactaaaacttccaagtggccctatactttagttccccataaattacattaatagcctcctttcagccacctaaattcgcttctatagccgcgcgggtttcttctgttttcttcttggcattttccgtaccaaacgccgcccggaagccccgcccgcggccgccactcttcctcgccgtgcagccgcgtctccgccggcccccgagctgctcgcagcctctcaccgccttcacctgcatctgctgcaccgcttgccgcctccccgaccccgtagacccccctcagagccccgtaacatgagcgccaacacggtcgagcccccgctctccccgctctcggacgacgagtaccactacagcgacgtggaggaggaggatgagtaccagtactcggaggaagaggaggacgacgtcgtctccgtgcagtcggacgccaccccgaacaccggcgccaagaagcagcacgcggccgactcgctgtccccgctgggcagcgcgtcggccgccaagaagaagcggctgagccccagcggcctgggccaggccggcagccacaagcagcaggagtaccacgtcatcgacgaggcggagctgctgcaggagcagcgcgcgctcatcgcggagatcgcgcaggtgctggagatctcggcgcccgtggcgtccgtgctgctgcgctacttcggctggaacaaggagaagctcttcgagggctactacgccgaccccgtcaagacccagcacgaggcgggcgtcgagttcgcggacaagccggcgccggtcatccccgaggggacgaaggtagagagagaatgagttttgctatgcgcagggggctgatacttatattcacgttctttgctgctgctaccgttaggtggactgcaacatttgctgcgacgagtacgcggcgaacgagatcttcggcatgggctgcggacacttgtactgtctcaactgctggaagccctacctgtccctcaagatccaggagggaccgatctgcatcaccacgacgtgccctgcacacggctgcaaggaggtgagttcgtgtgcgatactgtaatttggtgttgctcttgttgttaatcgttgttgcttttggttatcaggtggtgagcgacgagatcttcaagcagatcgtcagcccggaggactaccgcaagtacgcgcgcttcttgctgcggtcgttcgtggacatcaacaagggcgtcaaatggtgcccgtccgcagggtgcagcaaggctatcacgagtgccggtggactgttgtctgttacgtgcacgtgtggatgcgtgttctgcctccgctgcggcgaggaagcgcactcacctgtgacgtgcgagcaactggcgtcctggcaggaaaagtgccgcaacgagtccgagacggccaactggatccttgcgaacacgaagaagtgccccaagtgctccgtgcgcatcgagaagaaccagggctgtaaccacatgacgtgccggagctgcaactacgagttctgctggatttgtatggaaggctgggacaagcacggatcgggcactggaggctactacaagtgcaaccggtacgacgcagacgctcagacggccgacaacgatgcagctcgcgcgaaggccgagctcgacagatacctccactactaccagcgtttcgcgaaccactccgaggctggaaagtttgcccaacggatgcgagaaggtacagagaatcgtatgatcgagctccaggccagtcacggcgattcgtcgtggatcgacgtgcagttcctgaacgccgctaccgagcagctgattgaatgccgacgagtgctcaagtacacgtacgtgtttggctactacctgccgcctggaaaggagaagaacctgttcgagtacctgcaggagaacctggagaagaacgctgagcacttgaccgggctatcggagatgccgctggacaagatgaaccgctcggagatcatcaactacacgcgtgtgacggagacgttcctgcgcaacctgctcacgggcgttgaggacggtctgacatccaacgcaccactggtgtaggctctgtctcggtggccaatgctgcgatgctaggcttgctggcttcccggtatgcatgcatgcacgcacttgcttttctgtctcggtttttatttgctctgatattaggtacgctgggcgttgtttgctgctcaggatcgagcgccaggacgcttatgatcaagtccattaacccgtagtggtgctctcctgcagcgaacggcgctaagtatggacgaaataaatgaagtatggaggatgcgttggcgtttgcatacttatattttagagaaaatcgtcgtaatgaactgcgaacaggcctcacgagaataccttacgccgcatgcatgaggccaccaagatacaagaaccgatctcgtccgctaaatcaatcgtcatcatcaccgcgcagtgttctagctgctgatcggattgccttgcgcgccacgggctccttgatgcccacgaagttgaggtcctccatttcaatgccagtctacgcaaaacaagtcgcacaggttagcaactgaataaacatgagcacgaaagagctatggctgaagcaacgcacctcgcggatgaagtcaagcgagtcgaagcccttcgccttgagcattggcgtatatctctggaacccgatctgcttgagccagaggtacacctcatcagcacggtcctcgtcagtctcgggcagttcaggtggttcttcaaacttggctgtagcactacttcggcgcctgatcttccgtggggcatcagcatctgactttgccttcggcctctgctcctgcggagtagacgatgcctggccctgcgactgttgcttggacttattgcggctggggcgacttgcattgctgctgctcgcacttgttcctgtggtactattgttcggcaaatcgtgctcacgcgcgtacagctcgttagcgtagtcgatgccttggttgatgagctccatccatagctcaaggtcgcgtttggataccgcctggagctcgcgcttgatcttccagttgctgtcgatcacattgaaccgcagttcaggcatctccatggtcttccagatccggcactcgcgcagcgacagcgaagagatgggaggcagtgtgcagcgccactccgcattctgttgctgctgctgtttccagcgcggaggcacgtctgtgtagtgaagctggtcgtggtccgcgatgaaccacttctcaacccacgagcgctttccacggcgactgcgcttgaggatcaccccttcgtggtaaggagcgggtgacgcgggttgcgccaacacgtcactatcaacgctttcgtcgtctaagaaggggtcgtcaactacctgcgagtgcacgttgcggtcgtcctcgtccgaatccatgcccattgtgttgtgacggccattcgcctgtaagctgtaactggtatcttcctcctcctcttcttcttcctcctcctcctccccatagtcctcgccgtcgtcatcgtcttcatcattctcgccgtagtatgcatcgtcgtcctcttcaatctgcggctcacgctcatctggcgtaaacggaacaagctcgacgttgtcatgaagggagctgttcgtttgcttcagcacatcttcaagggtccgcacaatgacaccgatgtttgggcgttcacttggctcgaatgacacgcacttctccgcaagcgttgagagcgccggtgggcatgaggcgggcagggcgtcacggaactctggcaggagaacctggaacttgtactgcggtaggcgcatcaaaaacccatcggcgttggcaacgcgacagcagagcatctccatcatcactacaccaaaactgaagatgtcgacgctctggtcgtagtcctcgtccaggaacatctctggcgccatgtaggcgtccgtgccgcagtacgacttgcgacgctgcttgctcgcgtccgtctcatgcgtggtgacctccaccggcttaatctccacagcgaagccgaagtcgcagagcttggcccggtgttggtcatccagcaagatgttagaggatttgatgtcgcggtgcacgatgtgccgctgctgcaggaactcgatgccctgcgcagcgtccagtgcaatgcgcaccatgcggtgccagccaatgtgcggcttcttgccgctgcggatggccttgagcaacaggtccacgtcgccgttgttcaggtactcgctgagaatccagacctgtttggcgcggacgttgtcggcggcgcctgcgaactgcaggagcctctggtgacgcagctgacgcagcacctgcacctctcgcagcacgaaggccgggatgttgccctctgcgtctttcggctggcacttgaccgcgacgtgctggccgctgtagtcgccggcgtagacgatggagaaggcgcccttgccgatctcgcggccgatcttgacggcggcaggctccacctcgaagagcagcttggcgtcgacgccctcctgctcgggccactcgggctgctgccgctcgggctgctccggctcctgttcctgctgctgctgctcctgctgctcctggtggagctgcgcgtccagcggcgcgggcggcggctgctgcgcctccagctgcgacttgaaggccgcgagcggcgacttgtgcggcagcgggcggcgctgcgcgtactctccggccagcagcgtctggcgctggttgcccgacatggcgctgcggctctgctgcgggtgctcgagactcgacgggagggcgcggcggcggtcggtcactgcgccggtctcattcacgcagaaagtcgcggccagacagcggcccagcatggcactgctgctactgctagtcgccgcttttagctccagggtgcctgcgtaacggcccgccaaatccggactgccctgcttcccttctctaccgacccgagctattctctgtcgcgcgcttcctcgcggtttgagttgtgactgccaacttgagcgggatgggagctcttcgccgcacgttccctacagtttcggagcggtattgataacgcatatacctctcaaagtcggctgcgaacttaaggattgaagctccgttttacctgctttttttaatcatccttatcaatcgcttatgacgattgggaggtacctttgcaagcggtctctgagctggagaggacacatggctacacacgaatctctcggccaagggcttcgactcgatggcgtcgccaggagctctgggtggcggcgaacagctttcgcgggactccagcccagcgacgcattgcgctgcaatgcgctgcgtgggaatcgcggcagctgagagtgtccgcgcagcataaacgccgtcggaatccgactcggagcggcgatccatgcaaactgatattttttggtggtcacgagcgcgaggctcactatcggtgaccgtgcttcgagcacactcaacacgtgcctccttccagcagctcggccagcattaaggagactttactcgcgatcgtcatgaaggacgcgttccgacgtggacgctgtctctgcccttggggtttcccttccccgcgcgtcccgttttcacgcctggtcttccttcaacaagcaaacggttcgcagccgctcagctcgactcgactcgatgcggctccacggattcgtatcgcagcgctgcgttctggacgcgttgaatagttcctgggcaccttatttgagcatattttttcgttttgctgaatcagctcgctgaccgctcgccgtgtttctcacctcggcttgttccttcctggacggatgatggctcagcgcgttagcttacgagcctcggtgatagcagcaaggagagaagttcgatcgtataattaagataaaccctacggtggtcgagctagcttcgacttgcgactaacacgcgcagcgcaggcatgtactcggcgatgatggcggacacgttgaaagtcacgtggttgagcatctgcaggttggcctcggtcatgacgcggaattcgtcgaagctgatgaagccgtccttgtcgagatccacgtcctccatagtcttggccactatcgtggcgaggcactcggaggggatgttgatgccgttctcctggatacatgcctccagcatgctcagcagctcctgcgtggacagcttcccgtcgcggtcaaagtctaaaatgtcaaaggagactgcaccacgacaacgcaaaagtcaggccactgagcgattttgtacagtagagcagcgctcgcatattagtagcggacgcacatttgatcttctcggccgttccgcccttcgacgacagcaccgagacgctctgcaggaactcgtcgaagctgataaagttgtcgttgttggtgtcgaagagctggaagatgcggtccacatacagcgactccttcacggtgaagcccagcgccgtctggaactcgctgcggtcgatgagtccgtcatctcgcttcgcagaactgatgaggtcgtagtgcacgtgcagagcgatcacctcgtccggcgtcaagttggagctgctcgcgaacgcggccacctggtcgtcgctgagtttgcaggttagaggaggtccactgccgccgtccgctgcgccggcccccaagctgtccctggctgtggatgccgctgcgcccattgagccgagttgtgcctgagagggtcaagttgcagtccgtttttggctcgcgtcgcttcgtgatcaaattttgtgtatatttggtgtgcaaccaaaaactcgttaaaaccccgctttattccgtctcactagctgattgggtgaattagtcacgaattaagtgtcttggtctctgtatgccagagctttgccagccacacgccgccaccaccatatcgacggcccccaagacaccatgatggccatgcgtgtgctgaccaagcgcctgcctgtgcgccgcctgcagacctcggcgctgcgtgcgctgtccacggaggcgccttccgccggcgcggctgctgccggcgcggctgctgccgatgcggccgagtctgccgccgttgagaagcccgaggagatcaagcaggaggacctaggcaacctggctggcgtcccgatctcgcaggtaggcagatctacagtcgccaatagatcaattctttgggtggtctaactgtattgtatggtgctacgctaggtgacggccgaccaccgcctcaagttctttgcgttcgccaaggagcagcaggacgagctcttccccgagggcgtcggccgccgcatggatgagaccttcgacctggtgggccaccgccacattatgctgcgtgacacgacgctgaagatcatctcggccatgaagggtgcgatcaatgcaatgatattaagctctctggctgcggagaagctaacgggatcgctgcttgtttgttgtctgcagactgggagacggccaagaacgagtcggctggtgcctacctcatcgacggcgagcgcggcacgggcaagagcttcgcgctgcaccagatcgtgcagtacgcgcgcgagagcaactgggtggtgctctatatccccaacccgcgctcgtggtgccacgatgccccgtacgtgatgcagtcgccctaccaggaggacaagttcgacatcgacgtgtatggcgtggagctgctgcagcacttcctgcactgccacggcgagcagctgcgctcgatccccgtgcgcggcaagtacgccgaccgctactaccccacggacaagtacgagtccaagcccaagagcgaggccgactacaaggatgccgccctcacgctgcgcgatgtggttgtcagcggtatccgtgacgaggagcttgcgtgccaggccgtgtgcgacctgaaggaggagctggcgcagaccacggaattctccgtgctgatcgctatcgacgactacaacacgtggttccagaagaccgtcttcggctacgagggcaaggacgtggaggccgacgacatttcggtgatcgccgccctgaaggacattggcgccaagggctacgacgagtcgcgcaagctgaagaacggcctcttcgtcgccgccgtgacggagaacttccccacgaaggtgcacttcaagcagcaggtggactaccgcaagatccgcgccaccatgcacacgtactcggccgaagagctcgccaccgtcgtgtcgtactacaaccaagtcagcttcctgcacggtgcgtccctgcctgtcaatgtattgagaccgtgtttagttcgttgtctgaccgtttgctgtatctctcgctttgtcttttgcagacaagcccacggactcgcagctcgcgtacttccggctcatgaccaagtcgctcccactccacgtgttcgaccgcgcgtcgttctcttagattatgacggtggtctgcgtagcttctccagctacgcggcggcacctcggccgggagatgacagagcaggcagttgttagacagacagcatgatgatgattgaagtagcagcaccatgtttccctatgtttcccccccccccttcaaccaccttacgtttcgtacacaaaacaatgtgtaccacaccacacaccactcctatactgaaaccaagtgaaccgctgttccgccaccaacctcaatcgaaaagcgcgtgcctcctctcctgctgtaatccttcgcccataatggagtccgcgggaggcgcgtccgtgcctgcgcctgcggccgaggcgccgcgcatgtcgctgacgcccaccgacgtgaagaagctcatggacgcggccctgcgcatgcagcgcgcgggccagaagaaccaccccaagtaccagcagatcgtggccctgctgcggcagtaccagcagcagcaccggcagcgccaggtccagatgcagcagcagcagcagcagcagacacaggcccccatgcagcctctggacgtggcggccaacccgttcatgcagcagaagacgacgctcttctcggacaagcagctcgagtatctgcacaaccagatccgcgcctacaaggcgctgtgccactccatggacacggccatcgcgcaggccaagcagctcaccgccgcggggctcaccatgcagcccacgggcccgtcggccaatatgatggcgggcgcaacgggcgcgctcccgcagcagacgcaggccgtggaccctcctgtgctggagctgctgacccccaagtggacgcgcgcgtcgcgcaacttgctgtacattggacccaactacctggacggagacctcatcggcatcgagaacaagggcaactcggccttcgggccgttcaacgtctgcaccccgtggctcggcgccaatgacgtcgcgctcaagatgcggtacatgcacacgctgcagcagttcctgacgtccagtctggagaagctggagagccacacagaagatctggacgagaacgagctgcgcacgctcagagacctgcgctgtgtgctgctgcaacagaagctgcagcgacacgtggccaaggcgcacacgacgcgcttggcgctgcttggagagccgtctgcggtcgaccgcaagtccttccgacgtcggcgtccggtctcgcgcgtggagctgcagggcgacgagcgcgagaagcgcaagaagtccgtggccatggagaagaagcgccgcgcagaccaccaaatgtacctcaaggccgtgctcaaccactcgcgcgagttcttcgcgtaccacaagaacgtcaaggcgcaggcgagcaagtctgcgaaggcggtcaagggcttcatcgaccagaagaactccaaggccgagcgtgaggaagatcgtcaagagaagcttcgtctcaaggctctgaaggcgaacgatatggaggcgtacggcaagctggtggccgaagccaagaacgagcgtctgacgtatctgctgagtcagacaaacagctatttggacagcattcgccaattggtgcgtcagcacaagcggaagcaccacgtggtggacgagtacacggcgcactacgacgcgcaccacgacggtggcaaggacacgaacgccgaggatgaccaggatgacgacctaaactacttggagattgcgtcgaagggagagctgcctcgtcagcctcttatgctcgttggtggagatctgaaggagtaccagctgcgcggtttgcagtggatggtgtccctgtacgataaccacctgaatggtattctggccgacgaaatgggtctgggtaagacgatccagtctatctcactgctcacgtatgtgacggaggttaagcacaaccacggccctttcctggtggtcgtgcctctttccacattgtcgaattgggtgaacgagttcaagaagtgggctcctgatctcgtgctcgtggtgtacaagggcccaccgcaagtgcgtaaggaactgcacaggcaggaaatggcgtcgtgccagttcaatgtgcttctgacgacctacgagtacatcatgaaggacaagcatgtgctccgcaagtacgactggcagtacattatcgtcgacgagggtcatcgtatgaagaatgcacagagcaagttcgcaatgacccttggaagcatgtatacgtcgcgcaaccgactgttgctgacaggtactccgctgcagaatagtctgccggaactgtgggctctgctaaacttcttgctgccgacaattttcgagtctgttgacacgttcgagcaatggtttagcaagcctttcgctcagttctctgggaatggtgactcgaacgagctgtccgacgaagagcgaatgcttatcattaaccgactgcaccaggttctgcgtccgttcctgctgcgtcgtgtcaaggcgtctgtgctcgaccagcttccggacaaggtggagaaggtgctgaagtgtgaactctctggctggcagaagatcatgtaccgacgcatccaagaaggtggcgcgctgctgatggagacgacagacggctcgggtaagaagaagggaaagaccaagtacacgtccaagggtctttccaacgtgttgatgcagctgcgcaaggtgtgcaaccacccttacctgttccagacaaatgattaccagatcgacttcgacatcgttcggtcatcgggcaagttcgagttgctggatcgcatgctgccgaagctgaaagctgcaggtcatcgcgtgctgatgttcagtcagatgacgcaattgatgcacgtgctggaggactacttcaactatcgtggcttccgctacctccgtctggatggttccacaagtgctgatgaacgtgaacagcgaatgttcatgtttaacgcgccggactcaccgttcttcatcttccttctcagtactcgtgctggtggtctcggactcaatctcgcgacagctgacacggtcattatcttcgacagtgactggaaccctgccatggatgcacaggcccaggatcgcgcgcatcgtatcggtcagaagaatgaagtgcgcgtcttcagacttgtcaccaacagtcctgtggaggagaagattctgtcgcgtgcgaccgacaagatgaatatgaacaatctcgttgtggaggctggtaagttcaacaaccgctccaaggaggcagaacgacgtgcgatgctcgagagtctcatcaagatggagcaggaggaggcagcacacgcagctcacggcgatgatgacgcatcgaacgttctgttggatgacgagattaatgagatgatggcgctgaccgatgaagagctcgctttgtaccagcgtctggatggtgagcgtaaggctcgtgaggcgaaggagtgggaggagtactgcaagcaataccatgtcccgcacactccccgttctcgcctgatgtcagagaaggatgccccggcttggctgcgcgaagccaacgaagttatggagcacgacattgccaccggaaagcacgacaaggacagctggaactttgacatggaaaccgttgcaggcaaaccgcgcaagcgcaaggagatgtcgtaccgcgatcagtttaccgatgctgagttcgttaagatgtgcgaggatggaatcgatgaggacgagatgaaggctgcggcgaagagtcccaagagctccaagcaaggcaaacggaagcgcgacgaggacgaagagttcgtggatactgctgccgctgatgaagttgaagacgaagacaaccccaatgaagacgacgcgggtcggcgcgaacgcaagatgttgtgctactactaccgcaaggtctacgaggccgttaccaaactcaaagatcccacaggacgtctacgctccgagttgtacgtggagaagccgtcgccagtggactaccctgactactacggcatcgtgaagactccgatggacttgatgaccatcaagacgcgcctcgacaaatactactacgcgtcgcacgaacagtttgaagccgatttcaacctcatgatcagcaacgcgcagctctacaaccatcacgagtcgctggtggtatacgacgctctggagatcgacaagtgcgtcaagacgaagatgaagccgctgcacttgaagacgatggagcagatcgcagcggcgtacgagaaggccaagaaggaccacaagcgccgctccaagcagcgcaaggacaagaagcgccggcatcactaagggaagttaagttgtccacgtcaacgtgcattactccattccagcgtacaaaatctatcgaccctccttgtctcgtagtagtagttcttatcgcgtgtatcatcgttatacttgaacgcatgttaggtaaagtagccggcgtcgatggcgtccgagctcgtgcccttgctgtccaacacgccaatgttcctcgacgacggagcctccttgaacgtcttgtatgtgcgctatgaaagacaaccatgcaaccagtaagcaactcgtcatcgcttgcaactcaaaaacacaagacaacctccacccacctcaaggttatcattaaccgccatgaccgcggccaagttgccgaagcggtggcagtagttgggcgcgctccagactgtcgaaaaggtttctcggaagagcacctggtagccttccatgcacaactggtgcgctcgggccatgtgcgaaagcttgttcgtgtgcaggaacttctccaccacgtcctctccgaagatgtagcccgctcctctcggcgactgcaagcaaaccacaagcaaaccacgaatcaaccgatcagtacactcttctcctttcactctcctctcctttccgccctcaccatgtggaagccgagcgtcttggagtccgggtcggaccacacaatgtcggcgaagatgccgtcgggcgggatctcctggaaccggtcgagcatgcgcagctggtccagatgatgcagcgccgggctgagtccgccgtgcagacacagcaggcggtcgtcgatgagcgcgcccagcggcaggaagtcgaagagctccatgaaggccttgtagatgcgcgcgtcgccgtcgtacttcttcatgcactcgatctggaagccgtagacctgcgtcgtctggcgcgactcgtggttgccgcgcagcagcgtcacgcgctccgggtagctggccttgagcacgcagagcagcgagatggtctccacgctcatggcgccgcggtccacgaagtccccgaggaagacgtagctcgtgtcgggcgcttggcccgccagcttgaagagctccagcaggtcgtggaactgcccgtggatgtcgccgcacacggccacgggcgacgccacgcgcaccacgttgtcgtcctccaccagaaggtccttcacgcgctcgcacagcgccagcacggcgttgccctccaggtgctcgccgcgctgcagccgctccaggtgccgcccgtagtgcgtcgccatgatacgagtatttcgcagtcgcgtcgaaaatggcgaggcgtcgtgtgaaccacatctattggtgtgaaccacaggacgataaagtccacgtgaggtggacatcttcgactcaactgtattcgggacaacagaagcttgtttggaagtcgttactacaacattgctacaacatcacgatatcttaatgagagcaacacagtacagcgttgtgttgctcggtaatttatgcccaatttaattttcgaagaagttcaaattgaagttgaaatttcaccaagatatttccataccattaaagtacgaatctccggatgccggccgaagaggccacgaagcaacccacgggtgcgaaaggggtgaagaaatcgcccgcgaaggcgaaaaaaatgacgaaggcgaagaagccagtgtccgctgtgaagggtaagtgcaaataatgctgtgaatactgtcacaaattgatctaatacgtctcaacgttgctactgcttagacaagcggatcaagggagtcggtaaggtgctcgagtgagcgaacagcgccgtgaagaagaccagcgtagggtaagcaaaaacgatatggtttgaacaaggtggctctaatgggcactaactgcttttatttcacatacccgctgctacttcctgtacaataggacgacgtgcttctctacgagcgcgaaaacccgttgactacctccgtgcagtgctgggttttgtccaggaccacgccagtgatgatgattatcgtcctgaagacgacccggacgatggcgtcgacgaccgggacgacggccccgacctcgtggacaacctggacgactcggacatcttgctgggcaccgacggacccaaccagagcacgaggagcaacgtcaactcgagcgttatgccgaataaagtgctacccgtacaggccgctacgccgagcggcattgtgcaccaggttgaggtgccagatgacacggcgctcgaccagcacgacgcgctagaagcggaggggctggggaaggacgcggcgtcggacgccccggagctcaaccaggccaatgcgccggaggacaaggcgcccagcaaaggcacgatgccgggcgactcggcgcccgacaaggacgatgtgctggccgacaaggcgcccggccaggacgtggtgcaggacgactcggggcccggccaggacgtgatgctcgacgattcggcgatcgccaaagatgacctgctggacgacgcggcgcctgccaaggacgacgtgccggtcggcaatatgccagccttcgagggtgggcgggatggtgaggccggagtttgctcacagtttggctgtgtacctgccctgaacgtagtgctccataccggcgggcatgacgacgacgagcagcaggactgcaatgcgggcactaccagtagctcatgtaagtcactgatatgttggctatgttgttgtcaatgttgcttctttttgttaataatgttggttatgttgcaacctgatgacccttttccagctcccacaaaaaagagggcgaggcagcataaggtattgaccacggagtgtcggtcggctaaagtacctcggaccagcaacagtgccgttgttgctacgtccaaaccgaaggctgctaccaaaacaaagtacacgcgccggatgaagatatgggaagaccgagagaaggtcattctcgcgcataacgctgttgacaatcttgtccccgagcttcctgataaagagtacgcgaactgggatgtgtttgatgccgcgctgaaagcgcacgagaaagcaaactacttgaagttccgcgtccgcagctccgaaaccaaagaaaagcacgacaggtatggccgtatgttgcttcgttgttatgttgcttgctcatggtgctttgctaattgtgcaagctaatggtgctttgctttgctaattgtgttttttgttgttatgcttatttattagtcgccgtggcgtcgtgccgttgccggatgagatggcgtacaactttaagaagatgtgttgcacgcatggatcgacacaagcgtcacgaggggccggccttcgtgagcacggctcgcgttacactggctgccaggcttcatttgatgtccgttctcaaaagatcgtcgtcgatggcatagctcggtggatcgtgcaagtggaccccgacacagaggtaggacgatgtgtgaattctctggtgctgttgtgtaaggtttaacttatgcgggcttgtctcatgctttgtagatttcgttgcacaaccatcccactaacaaaatcatctacgactcatacagtcgtgggaagtcgatgccactccccccgaaagtccgcaaggagcttggactactgaaagaaatgcgggcgagtaacccgaacatcagccgctacttgtcggatgagctgggtgggtgctactggtgaacttaaggctacatgtagctattttctgctttcggactaactctttattgcaattaattttcactgcgcttgctttcagatatcatgcttacaccacagcaaactagaaacatcatgcagcaagtattggggagcaccacgttggaacggaccaaagtcatattagatagcttcgccgctgcggacgcggagaatgaggttctgcttgtccaagatcagatgggcattagctgcgttattgccatgcagacagctctgcaaaagcctgctttgagcagcggggggacaacttggtgatagattggacccatgacacgaataacatggggtaccacttgggtgagaacatcacagtattattttgtatgatcggcggtgtgtatttaactgtgtgtatcataggcagtctggttgtgatctcagccacaggaagggggattcctgttgtcgacttcctgtcgctcgatcaaaaagcaccgacgacaacgcagattgttgagtttttcaagcgcaacaaccctgcttggaaaacaatgtagaccgttgtgattaataaggactttatggagtggcgagtgctggatcgggcgtttccagatgccaaagtcgtcctatgtcagttccacgcgctgacatactggcgcaaggtttgtgcaagagcaaagttcaacctgagcatgaaccaacgggacgccatggaaatctgcattcgcaaatctaatttactgattagttggatgttgctatgggatttcttgaattatgttgctgactgtgtttctctttatgttgttctgtgtgttgcttgtcctgtgttgctacgtgtgttgcttggatttgccatatagtaacacccagtcggcatttgacgccaagcggtccaccttcactaaaacttgtggagacgagtgtcccgacctattggagtattttgaggcgaagtgggcgtcgtgtatcgatatgtgggcgaatcacgccaggggaaagtttttcactgcgggcaatacgactacgaaccggattgagtcgaactggaatcaggtgaagctgttgattggaaagaagccgcgattggaggtgactattagtgggctacttgctcaccaaacaacaattgcccacagtatgctcagtgcaatgcgcaggacatctgcatcatctcgggcaccgggtagcgttccggactacctgtcgcttgtggcggggcgcctgggtgataccatgctagctcacgtcagacgccagtgggactactacatggtattttcggcgagcacgtcttgctctatgcggggacgggaggtgggtgaatgggaactgacttctcggggaaacacgcatcgctgcaacgacttccgctggtcgtgttcgtgcctcttcgacagcagctacagcttgccgtgccagcatctgatgtacattgcgcagtatgtgcataagtttgagaagctgccggcctccagcgtacctccacgatgggatgctgtggtgatggctggattggaggaggaattttatcgcggcatggaatcgcttcggagcgtacagcgcgcggtgaaagcagcttgggatacgtggtgtgctgtgtatcgctcaggcgtacgccattttgaaggatagctctcgtttcgtgcgagctgttatttcacgggatgatgttgctgtcatgcgtctacgcgtcatgtggatgattctcatgcagcctgacgagagtacaacgtcaaacaaggtcgctaaagctgtccagtcaaccgacatcgagctcattgcaacgatcacgacataaagaccacagtaacatttattgatgtaagctagtctatgatgaatatgcgcattggcttagacgtaaccccacggtttcagttgcacattggctcttgtgtataatggtggctggcgttccttcgacttcggatctggattgtacatgtatcccttgaagaacgcgctgtccggtccaatcgaggtcacaaccacgacctctttgtggccatgcaggaagtccgcctcagtcagcgtgcagcgcacaacatccagcgcgtcgcgatagcgcatgttgtcgaaggtcatggtaaggatggcgttcacgccgaagacccaaggcgcgggcatgctggcgcagtgcagccgaaacgccagcagcaggaaaagccggtgtacagcatggcagtgaacgacacgatgagcacgaaggtgacggcggatccgccgtagtacgccggcttctccagcagcgcgctgcactgaaagagcagcgggagcttgcccgccacgacgttggtggtcacgagctccagcgccaccggacacgtgatgcgctgcagcccgcgcagcatcagcgaggtcggctggtccgcgcacgagctccagccgctgctccaatttcgccttgtggtcgccaaggagggaatcagctgcggcagctcacagccacacccttgagcgcgctgttgcgtatgatcggtcttcacttcgcggtcgtcgagaatcacgtcggtcttggcggcagtgaacacccaaagcagctcggggatcttgaacgacaagaggtccttgcaggcgcgcgcggcatagatacattatcagaaccgaaaggtagtggcggcgccttcgtgagtctggcgaaaggaagcgatgacagtcgctggtcgtgttgtcttctcctctagaatatttcgcgaatgtaatgggtaacttttacatttgccgtcatatatcgacagaaaattacggctggctccatttcatgttgcttcttgtggtgcctgttgtgttgcctgacagctattgtgttgccgcaagagctgtcgtgatgttgcgcttatgttgtagtaacgccgtccgaagctgttagcaacgatagaggctctgcgtttttaacgtacagtaccatattgaccgcatgtgtccacggcagactgccttccagatccaagtaattttcccggcgagagagaaaatatgtaaggaaccccgtgcgctgtgcttgacgatcaggttgttttccacccattttcccaagtcacgcgtcaacccccagaaggctgccggactccgactacagtacgtagctgcgtgaccccacgtcggcctcatcactcgtctggcatggtcgcgacgctgcctgaccttgtcgtgcctggattcggtgctgtgggggaagtcctcgtgaagatcaaggagatctgtgttaaaatacacgacagcaagaatgcctgcaagcgcatcagtatgcagctgcacgacatattcgacgagatcatgaaactgcagagccgacagcggattccgtctacatgtagcaaagccatcacgaagtacgtgggcgttttgatggacttcaccgagtttttggagcgccaccaagacaagaaagggctggaaaaactcaaagagcgatgcaagctgcccagcaagctcgagaggatccagagcgatgtggagatgctgtttcggatgcttaacttggggaccgcggacatggtggccagcttgaaactccgattcgaggacgaacagcgcgagcaaagacgggaactggcaaaactgtcggccgacacttcgatcattcgaaaggagatactagggtaccgcgaaacgatgcacaagattctttccttgttgtattcgtaccagaactcgcagggggcagcgaaaaagcacctgcacgatgaattgtcccgcacgctgaccagccttcagatgtcgaacagcaagtggcagtccaaggaaatgcagatgatcgagactcagattttctccgcgctttcggaaacaccgttgcccaggaagctggacttgcccgaatggtttctgcccgatacagaggtcacgtatgagccaaaaccctgtagccgtgcatcgtttggatcgttgcacctcggagcctgcaacggtaccgacgtggtcgtcatgtgtctgaatgacggtactggagaaagtctgcaaacaaatgaaaggtttcagcgatacactactcgatggcacggacttgaccatctacacgtcgccaagatgttaggtgtttcgcacctgagctccccgccgttagttatctacgaggaggtgaagtacaacgtggctggatatctcgcggactcgactaacgctggaagtatgtggcgattgctgtacgaaacggcacttggtctccggtatgctcacaacaagaaggttttgcacgggaatctcaagctgaccactatccgagtcgattccgaaggccacgcaaagatttgcgggttgggggcggtgacgaaaaattgatcaaggccttcccgtctgaaatcaggagcagtacgatggcaagcgccggagtgtttgacaggaaggcgcactttcgcgtccgttatttactcactcgcgatgtgcatcatcgaggctctgagcggtgaaccgccgtttgggcagctggatgatgatactgtgcgcgacagactcctgcgaggagaaatgcctgacaagccatccaaaatgagcgctgaaacttacacactcgtggccgaaatgaccatgaccgatcctgataaacgactctccctttctcgggttattgtgagactaatggacttcatgagttctgaagaggagacatgcaacgattcaaaatccccgagaatggtaaatgtggagcagcatgatggggcaatggatccttggcagaatgaatctctggttcagcagctttacgcaactcacgagagcgtatattcctctctaaagctccactacgacgattgatgaacccagcagaggaacattttggatgctcgacttgctgcacatttctttgagtcacaccaaaatacagcagatgtaccattgaatgggaaatcacctcgatactcgaataaagcgacggaataaatttgatgcgttctacgagcgatattctatttcgcttgaagtggggatgcgtgcagccagtagattgtactgaagcacttggctaacacctttgaagagcggacatgagcggattcttttaagggtaatggtagtgaaagagtgaactctttcactaccagagattttgaaaaatttgagaccgtaacatcaggctgaaacgcaactcgcgccgagtgattggtatttgacgaagtattcctgcaagaacgcgcaaataaatccgcagggcgacgatatagatttaaatgtaagctggaactggtcagcttggcctggcaaaagtaaatgtaagcaacacaagcagctcattactactcgctataactacgggcgcaggaccattgagctcgttactgtgcgcgcgacatggcgtgacactcacgtgcgcgtggactgcctcattttccgacatttaaaccaggacggcaggaggtcgtgcgataatggtaggtgagcgtccagtacgctcctcacttctcaatctacaagtcgactcgtacagcacctgcagaaacatattcacaagagacttgcgagcgaactgattggtagctcgacgatgctgaagctcgactcgggctttagtagcagggcgcgggtgctcaatgcgatacagcagcgctggtcaggaatgaacgacagccagagaagctccaagcgcgttctaacgcaggtgaaagtcgtctacgaggcgatccaggcggtggaaatgcggaatcggaatgcagcgaatggcgcactggcaaagtacaagaacgtcgtgctcgacttcctgaaatgtctggagaactaccacagcaagaacgtcttccagcgcttgatacaccatcgaaagaaggtggacgacctcgagcgcattcaaggaatcgtaaccgtgctattgagaatgctcagcatggagatggcggctgaaatcgaagccgtgaagcagcagtggaaggttgagcgatgcgaattacacgaccagttgggtaaactgctcgaagacgcctcggccagtctacttgagctgcaaaacgtgcgagatgccatgctcttgcttcaaagtggctcagcaaaggctgcaatgcaaatgcactaactgtaacgacccaacggcttgacagttgggttctagatgaaaggagccgggcgttcgtgattgagcgcccgacttcagcatttcgaattcagcgcagattggtggcatcaacacgaacacgaaggggcttacgctaaaaagtcagtgcacagcgtacagtgtacagtacagtgtacacagtaccgcatggcagcaaccgtgctctggtcgtgttcattaatcgttggatttgcgaaggatagtcgcggcaccgtgccggtagagtgctgttcgttcataacggcttcaatcttcgttcaatcttcgttcaatcctcgttattcctgaatttacgtctcaagcgcagctcgtctgggaacttcccagtgggaagacaggaaagaatgaaactccaccgagcttctgcggccacgttggtgctcactgcggctaccctcgctgtcgcgatcgcgatcgacttcaagtccgacttgagcctgaaaaccactgcggccacgaagacgacatctcccaccacgcagacatcgtcgtcaaccgttcaacagtccaccgagccaacgagtctggcacccgtggcgcctgtggcggcatgctcggatctgttggccgtcgacatgaccgctattggcggcaacgtcaccactgccaaagagaccgacagtaacggcatcacctactgctcggtcgaaggtgaattcacgtccactgctggctggcaggtcatgcttcccgttgcgaattggacgcagcggtacatgcaagtcgggtgcggagggctgtgtggccagatcagcctacagccgggagctcggacggatctgtcgaggtcaccaacggcgagtttgtgctggcatccacggacatggcgggcggatccgacggagagttcggtctcaacgaggagaaacgtgcggctttcgcgcatcaggctgtccaccagaccgcgcagacggccaagaagctcatccaggcctaccacgatcaggaggcggcgtactcgtacttcaacggttgctcggacggtggccgcgaggctgtcatggaggcgatccgctatccggacgacttcgacggaatcattgccggggcgcccgccatgctcttcacgttccagaacagtttccaccacggttggctttcggttagcaacactgacgacgaaggaaaccgcgttgtcatcgctgaccgagcttcgattcttcacgatgctgttatcaaagcatgcgactcgctggacggcatcgaagacggcttgctatcggacccgagactctgcgactttgacccgtcgacgattcagtgcgcgaaagacgccactgacaactccacgtgccgtgcctcacctcagctgaagtggaggctgacccgtggacgcgcacagtcgcaaatacctgacggtcggagaagagcagtacggctcggagctggcgtggtccggtgtcttcgtgtccgaaacgtacgacggcgacatcatgagcaccaacactgcgcttgccgccatcaagtacctgatctttgaggagtacccgggcgacaactacaccctgagcgacttcaagttcgccaactccaccatcgacctgctgcgatcgcgtcaccacctgctcgacgccgtgagctccgacctctcgaattccacaaggctggcggcaagctcattctgtggcacggctgggccgacccgcacatttccccgcgaacgacgatcgcctaccacgaagccttgcagaagcacatgggcgaggccacactgaacgagttcgagcgtctgtacctgctacctggtgtgtatcactgcggaaatggtgagggcccctccgctatcgacctcgtgacccccatgctcgagtgggtggagtccaacactgcccctggcgccattgaaacaagcacaccaaccaacaccggcgagagcaagttcggccaatgggccaagtcggaatccggcagtggaaagcccccctcgggccccccttcgaggcgcatgctgcagacggaagcgtctggatccggatcggcagctacgaccgtgactcgccccgtgtatccgtaccccgcagtggccaaatacaagggcacgggcgacgtgaacgacgctgcgaacttcgagaagggcaagccgctttacacgaagaagacccgctcctggctgggcgaggacgtcttcaacccatacacgccgacgaaggcataacttctaacgctggagcctagcagtagagtcgctggattagttccctaggcatgtgctagaagcaaatgaaagaccccgttagccagtctgtatacattgtcttacaccctgaaaagcaggaacacacctgtggtgccctctctaggcctaccaacagaagcacacgcgcgcagtcctctctactagcgttaaggctttgagtcctcgttcgacggctgcttctcggaatccttggcccactggtggtaaactgactcgggcatctgcagcactgcatcgccagacacagccacggcggttcgctctagacacaccgtcgccacctgctgctggtgcacgtcctccatggaagagaaggcgtaggtctccttgtccccatcaagagcacgggcattccgcatctcctcgcgcatctcgtgggtcttcttgaccgagtccgctgccacgtgcaagttcttggtcaagctggccatctcctcgtccgagtcgggctgctcgctttgatacgcgtacgtcttgctcttgtagagttgctgctccttggtcggcgcctcctcttcctcctcctcctcagcagcagcctcttcctcagctaccacagccgcgggcttctcgcgagggatgatgttcccgaagcggtcgagctccggttcctcctcctcttcgctctcttcttcgtcgacgtcatcgtcgctctccagactgggcagcatcatgcgctgcagccgctgctcgttctccgcctggcaggccgccaagtaggcctcctgggccgccaccacttgggcgctgtcctcgcaggccgcgtaggcctcgaggcagtcggcgttgatcttgaggaactcggcgccccacgagaactcgtccatgagctgcacggcctcgtccttgagccccacgatgtagagcgtggcggcgatggcctcggcgcacgagagcttgtgcggccggccgtagttgaccgagttggcggccacgaggaacggcagcaggcggtgcacgcccgagcgcagctgcttgtagggcagctcctgcaccttggcccagctgcagtcgatcaccgagatgcccgtgccctccacgatgcccctgtcggccggggacacgatgctctcgcccgcgggggacagcacgagcccgcggaagtgcgcgcccggcttcatgctcttgatgtagcccaggcggcagagcttgcgccccgtgcagcgcttcgagtcgcactgctggaagtcccacatgcgcagcgtcacggggaacgcgcggcgccggaagttcgtctcgctctcctcctctccgcgcgcaggcgcggcgcccgcccctttgccgcggccgcgctccttgcgcgacggcgggcctcggtccacgcgcttcttgcccattatagtctcggtctgcttcggaagtgatggccatggaaatttgagtacatgatttggtgctacccatactttagtcaagtgaacacaatggattaatgggtcttatggatacagtagagcccaattcgatgcccatttcctgtttgaagatgctgctgctgtggcacgaggcgctgggctcggacgacgagcaggcggcggaagacgagctctgcgcgcgcgtactgtacgcgcaggaggaggacgggcaccacggggaggagaggctgctgcagcggctgcacctggcgcagggactgctgacgttcgtgcggatgctgcgccgccgcagccaagacgacgaggccgagacgagcgccgcccagtggacgccggagtgggcgagcgtgacgctgtccaggaggaggttcttcgtcctcgaggtggagccgcagatcttcatggcgctggtagggtggataccctaccctggacgatgttggagttggtgaagttgaggggctgacagtttgtgcgcttctgctgcagggtgtgcatccgacagttgaaatggtgtgtaccgccccaacaagttgctgtctggagtgtgtatagtgccatagtgctaactgttttcctgctttcgcgcgggcagaaagaccacgggccggggtataaagctctgctccgagagatgtacggcatgttccgactgttccacgggagcatcgacaggtgagaatgctgcactgcattttgttacccatgacaattgtcagtgataactcgatgctatctctgtttgtagcaatctgcgcttactttctcctgcacctgcgcgacaaggtgcaggttttgacaacgcacccgacaagggtgaggtcccgttggagatgcggaagtacatggacgggatggatctcctgatggacattgctgcgacgcgaaaacgattgcggaagcttcgcattgcactcgattcacattcccataaccagtcgtttggtgctcccgacgagggcggaacagagagcactgctgcgatgacgcagctactagaagaagcgcaagcagtggaagcaaaactcgagctgttgttagctcggtctccagcagcgagacttcagaaaaagtgtgccgatttcttccccacgttgctgcaagccctggatgttcgcggggcgagtgggttctccgagctgcagggtcttggctacttcccgatggatcagcccacgtttctggcgcttcagaccttcgtcaacggtctacaagccgaattggagctttcagatacaagcactgaggaagcggcgctgtttttcaaggggaatcttttgtggagctctatggaaaccactacaatgcacatgctgtataacttccttcgacttcgcgaagagcgcgggatgaccatgcttcgtgatgacgcccaagcttttgatgaaccatactcacgaaacacgccggatacggatagctctcaactgtggatgtccaacgcgtacgatgacactttcctccctgtttggtcaagtaagctctcgtatgcggaatgcgacgcagtcgctcactcacaagacggaccgcctcacttgcgccgagcagcccggtcactgcataagcaacacccggtctcattatcaacatttttttcaggagtgccgcctttatcaggtggagctcccacctcctctactcttgccgctgactcttcaccgtttgggtcaccgtcgcattcacccgcggcatcgtcacggttagccccaccgcggagtaccggggcaagcccgagcagctcgaaaagtgccatcaaggcgcgagctcgctccatcgccttccgcaacgctgggctattgctgaagaatggctgcttttccaagctacaacttgcaaaccgagccaggatacctgaaacgggggtacccagtgaaacagaggcagtatggagtccgtttatctttccgctcgatgcttcaatctcttccagtcacgatcccaatgttgatatcgagcagagagcaggtcatcgagttgtggtgtggcacgaagcggacctcacgatggttattgtcttgcgtaccgaggcgatgatggtcggtgcaactgaaacagactcgaaaggcatccatgccggcacccttgagcgtttggaaaattatcttgacggccagcagcggtttcagagcctggctgagctcgttttctcgcgatacaacgccaccttcgcccccaagaagaagtatgcatccctattgcttgtggatgttatggaatattttgactgagactaacatgccaatgctcttgtagtgcgccaaacattcatccgatgccgcctttcctgtacatcaaccgcgtcaacctggcgttcagaatgcaacaggtgccgcggctgctcaaaagcaaggacgacgatctcttcccggtgcctgcaaagttgctggcgcactactttccatcttccacgatggcgatagtcaacgaattgcacgccgagttacaccggtgttcgagcgcaggcaaccgcgaaatctgcatccgcacgcgccacgctggctgggtgctcgccaagaagtcggagacttcgcaccgcgagatgtacgtcttcttcgacagcaagatctcgtcagtctacgaactatcaggtgagtgagttgtcgtgcctgtgagtttttaggataccatggtggctgacattaccctcgcatgcttggcgcccccatagattcgctacagatgctgctgcatgaccagtttggtaatgtattgttctagctaacaagcaacagcttcatctgcaactacgacggatagcaacgccaacacaaaatacgagcgcaaacagcttcaacatatgcgatgttgtgcgtggtgtccaccacaccacatgtcaaatactcacgcaaccttcgcgccactttctctcggtgcagggcggtggctgcaagccatttacgcgtttgacagggaagggagcccatgggcaagatcatcgagtcgatcggcagcgcgtacgcggcgcgcgcggacgacgcgtctgcgcgccccaccgtgtccttcgagttcttccccgccaagacgaacgcgggcgtgttcaacctgctgacgcgcgtggaggagatggggctggcgctgcagccgacgttcgtgacgctcacgtggcgctcggccttcaaggacgaggcgctgtggctgcgcatcggcgcccacatccagaacgagttccagctggacgtactgctgcacctcacgtgccacttgcccacggagcagctcaagcgcatcctcaagaacgcgcgcgccgccggcatccgcaacatcctggcgctgcgcggagacccgcccatcggcgccgagcgctgggcgcccgtggagggcgggctcagcaacgccgtggacctcatcaagctcatccgcgaggagcacggtgactacttctgcatcgcctgcgcgggctacgcggaggtgcacaccgagtcgtggaaccacccggacctgccgccctccaacgaggcgcgcgcgctggacctgcagcgcctcaaggccaagcaggacgccggagcagacttcatcatcacgcagttcttcttcgacgtggacaacatgatccagtggatcggggactgcaaggacgccggcatcaccatccccatcctgcccggctacctgccgatccagaactacagctccttctgcaagttcacgagctggtgcaagacccgcgtgcccgagagcgtgctcactgccctggacgccatcaagaacgacgatgccgcggtgcgccgctacggcacgcagcttgcggtggagacgtgccagcgcctgctggcggctggcgtcaactcgctgcacttctacacgatgaacctggccacgaccgtgacgcaggtgctggagggcctcaagatgctccccgcgcgcaaccagcgcgagttgccgtggcagtccacgctgcaacggtcgacggctgaaggtgaacaggtgcgccccattttctggtccaaccgccaagctagttacatcgcgcgtactgcggcgtgggacgagttccccaacggacgatggggagaccgcacgagtccggcctacggagagctgtcggagtactacctcgccttcaagcgcccgaagctccagcgcgctgacctgtggggcaccccgcagactgagcaggatgtgtggaacgtgttcgttcgcttcattgacggccacgtgaagcagctgccgtggtgcgagcaggcgctgtcgctcgagagtgctgccatccgcgagaacctccagtggctcaactcgaacggcttcttgaccattaacagtcagccgcgcgtgaacggcgctccctccagcgacccgtccgtcggctggggtggtgacgacggcgtggtgttccagaaggcttacgtggagttcttcgtttcccccgagaagatggcccacctcgtgaaggtcatgcgccgcgactacccgcagctgtccttccacgcgctcaaccgcaaaggcgacgagcaccgcaacactccgttgcacagtgtcacggccgtcacgtggggggtcttccccggcactgagatcgtgcagccaacggttgtggactcggactcgttcgctgcctggaaggacgaggcgttcgagctgtggcagacgcagtgggcgtcggcctaccctgcggactcgcgctctcgcgaggttatccagcacatcttcgacacgtactaccttgtcaacatcgtcgacaacgactacgcgaatggtgcgtgtccccacttggccactccaatcgccagtgccttattgtgctctgatctacgtgctaacgtgttgtgtttgtgcaactacacagatgagtcggacatcttcagcatcttcacgcggatcatcacggaagccatggacaaagagcagctgcgcgcgcgcgtgctcgagctggaggcccggcgcgagaagatgttcgacacgttggcgtcgttccagtcgctgcaggaggagctcaacggtgagctgcgctcggcacactcggagctcgcgggcgtgcgcagcgagaacctgcagctgaaggagaaggtccgccagctccaggctcagctcgcgctcgcgtcgctgtagtgcagtcgaccagcaaacgtccagaccccacgccagtacataggaagaagaagacaatcgcaacgacacggacgggcggccagtgtggctgcagcaagcacccgcctgcctgcctcccctcccaagcagcacccaacgacgacccacagtcttgttggccgcggattccgattgaccttcacttcgctttgcccggtgttgggctctgtagagaatgatagactgaatgaaagccacgccgcgccacgcacgcggccccagcatttctgcttggaaacttctcctggtggggccaagctccttcgtctccgtgattgctggaggtctgcccccttgggacatcgcttggcccgctcgcttcttttcgcttacatgacgtgtgtacgtggcggccgctctgaaattgcaccagtcctccagtacctctagaaccaaatgcgaacacataggtccaacttgcgcacgtaaactgtacgtggtcgaaaattccacggtccttctctacaaagggtatgacccacactcaaacctgtcaaaacctatattgtagctctgttgcgagctcccgccaggtacacccgctgtgcgatccagtcgctgctgggcatttccgcttttgcgccgtcccccacccagagcccaagagagagagagagagagagagagagcgagcagcatgagcagcgagcccgcgcgcgtgcagacgcgcctgaccaaggagagcggccccaaggtgacgggcgcggccagcgaggccaagatcggcggcccgttcacgctgacgcccaacccgcccttcgtggcggcgcgcgtggccgtgtacgaccgcatcatggccggccagaaggcgcagctcgaggcgctggccgccaagcagacgcccatcaagatcacgctgcccgacggcgccgtgaaggagggcgtggcctggcagacgacgcccctggacgtggcgctcgagatctcgcagggcctggccgaccaggtcgtcgtggcccgcgtgacgtaccgcggcaagcccgaggacccgttcagcgtcacggccgccgacgtggacggcaacgaggccagcgacaaggccggcgaggcctgctgcggcgccgtggccgactcgtccgagctctgggacgtgttccgcccgctcatcggcgactgcaagctcgagctgctcaagttcgacgaccaggagggccgcatggtcttctggcactcgagcgcgcacatcctgggcgagagcctcgagacgctcaagggcgcgcacctgaccatcggcccccccgtcgagggcggcttctactacgactcgtacatgggcaccgagacggtccccgagagcgacctgagcgtcatcgagaaggcctgccagaaggtggtcaaggacaagcagaagttcgagcgcatcgtgctcaccaaggaggaggccctcgagatgttcgccgacaacgtcttcaagacgcagatcatctcgaccaagatcccggacggcggcaagaccacggcctaccgctgcggcccgctcatcgacctgtgccgcggcccgcacgtgccccacacgggcaagatcaaggcgctggccgtcacgcgcgcctcgagctcgcactggctgggcaagaccaccaacgacacgctgcagcgcgtctacggtatctcgttcccggacaagaacaagatgaaagagtggaagcacttccaggctgaggccgccaagcgcgaccaccgtcgtctcggcgtgagcgaggagctcttcttcttccactcgctgagccccggcagcggcttctggctgccgcacggctcggccatctacttcaagctgctcaagttcatccgggagcagtaccgcgcgcgcggatacacggaggtgatcacgcctaacatcttcaacatggagctctggaacatctcgggccacgccaagcactacaaggagaacatgttcgtgttcgacgtggagggccaagagtacgcgctcaagcccatgaactgccccgccgcctcgctcatgttcgacttccgccagcgctcgtaccgtgagctgcccatccgttacgcggactgcggcgtgctgcaccgcaacgagctgagcggtgccctgacgggtctgacgcgtgtgcgtcgcttccagcaggacgatgcccatattttctgccgtgacgaccagatcaagaaggaggtgctggacttcctgtccttcatgaagtacgtgtacgacgtcttcggcattgagttcaacctggagctgtcgacgcgccccgagaaggccatgggcgagctggatcagtgggagcgtgctgagtcgcagctcgccgaggctctggacgagttcgtgggtgccggcaagtgggtggtcaaccccggtgacggcgctttctacggccccaagatcgacatcatgatcacggatgcgctaaagcgccagcaccagtgcgccacggtgcagctcgacttccagctgcccatccgcttcaacctgaagtaccgcacggacgacgcggacaacttcaagcgcccggtgattatccaccgtgccatctacggctcgctggagcgatttgtcgccgtgctggtggagcactacgccggcaagttccccttctggctgtcgccccgccaggtcctcatcgtcacggtgggcgctgccttcgtggactacggttacgaggtcaaggacgctatgttccgcgccggcttcgacgtggacatcgatgacacgggcaagacgctgaacaagaagatccgcgagggccagatggctcactacaacttcatccttgtggtgggcgcccacgagaaggagacacgctcggtgaacatccgcacgcgcgacaacaaggtgacgggtaccaagaccctcgaggaggccatcgccatgttcaaggagctggaggagaccaaggctgccgacgagtaaactatgcgcatggtagagcaggtgggtggcccgcaggtccctcctcttttagattgaccctctcaacggtagcgtttgttttcatttgcagtctttagcttcctaaaagtcatacagtcgtgagaggttcgttcatgcaaggatagtgttgtgagtttgactcgatttgcgtactttgcgaatgacagatcaagaattgcaccaaggttgatcatagtgtccaattcatcatctttcgccaatcggatgaacatcaaccgacttcaagctcaacgcgttgtgcaggccaaaaagcgcaagaatcaagtacatgtacacgtgactgcaacgagacaccgagcaccagcagcaaagtcatcgatcccctctcaaagaaaactatcttcgcgcagcccgctgattcaagcctcgaatcaaagagagaagtgcacggggctcaactcgcttgagtgtgatgaactcgaactgattttgcgccgggcgtgccttcacgtacatgtacgtggttgcagcatgcttggttgaccccgtgggtgcgcacagttccctgctacgaccggcgcgctaaggcctcgctcatcgatggcacgcgcgcgagcagtcctgttgagccaatatggagcccggttcattcttcctttctccttgcatcgcgcaccagaagatcaagcaacaccagcacgagagcccagcccatgaaggtcttctacgcgtctctcatcgtagcgacattgctcgcgcagtgcaccgtcttcgcggacgagtgtgcagatgccacttccaccggcacctcgactaccgagacttcgtcgcaaacaacggcctcttcgaccaagagctccgactctggctcggatctcttgtccgtggatctcacgtccatcggtggcgccggcaccaacatcacggaggcgactgaaacggaggtggacggcgtgtcctattgctacgtggaaggctacctgcccccacaggctaagtggatgatgcagctgcccatttcgacctggacgcaacgctatctgcaagcaggttgtgacgggttgtgtggcccgtcgatggtctctctctctcggtcgtagcagcggagggctccgaccaatacgagaatggacactttgcgatggcgacaaccgacatggacggcaccaccgatgggtccttcgcattaaacgaagacgccttcatcgacttcgcctacttggccgtgcacagcactgcagaggtcgccaagacgctcatcaagcagtactacggccaggagcagaagtacgcgtacttcaacgggtgctcggacggcggccgcgaggctgtcatgtcggcactccgctatccggaagacttcaacggcatcgtggctggtgcccctgcgttcctgttccagttccagaacagcttccaccacgcttgggacgctttgagtaacctggacgagaacaacgagcccatcttgaacccgtcgcgagttcctattcttcacgatggcgtggtggctgcatgcaattccctggacggcgtggaggacggtctccccactgaccctcgcatctgttcgtttgatcctcgtacaattcaatgcgctgacgacgccgacaattccacatgcctcaccgcggctgagacccacgtggccatcaacttctactctggtcctatcgacgaggccagcggcgagcacttgaccgttggtgagatgcagttcggctctgagaacggatggatcgacgttggagtgctcgccaccgatggagggagcgttccaagcgaggcgatggctctgtcaacgcttcgctacctcatcttcaaggatgcccctggagcaaactacacactacaggacttggtgtttgccaattcgaccattgaactgctcaagccgcaccacccgttcctcgactctgtgagccccgacctctccgccttccgtgaggctggaggcaagttgattctctggcacggctgggctgaccagcacatttctccgcgcacgacgatccagtatcacgagaagctgatcgacaacatgggcgctgacgccgaccaggacttcaaccgcatgtacctcttccccggtgtgtggcactgtggaagcggcgaaggcatgacgtcgtttgacctgctgaccccgatgttggactgggtggaggctggatcggctccacacgagatcatgacgtccacggaggagagcggctccagctcgacgtccgggtcgtccagcacgctctaccgcacgcgtccggcttatccgtatccgtcggtggcgaagtactcgggctctggtgatgtgaacgatgctgtgaactgggaggagggcgacgcgttgtactcgaacttgacggcgtattggcttggggagagcttcttcgacgtgttcacgccagtgatggagccttaagattggtagcaactggatttgacgtgctgctctgcttttgaaaagacaagttcactttcgtatctgtgtgtagcacttgatctaagcttatcttcggcattgaccatattcattattcgttggtttactcacctaaaaccgtttacgataagttagtgtaggtttacttgtgagacatcgaacaaatgcagcaccagtaaatgatatcaccgctgccccccgttctccatgatccggcacgacaccgtacaaaaggacgcaagcgcagacttttcgagacttgggccacaaagctgacggatacctgacggatatcaggttctctacccaactcagtcactacggcggcaagtattctgtggagcggttgctggcactcgaggagtacatcgagcgcacgcccttttctcgtgttgtgctggttagtgtcggcaccccagcgccgattgttgcggtggttttcttcagtttcaaaggttgaggcctgtataagccacgttaaactactaaagtaaagtaacgagctagataccaccgtcgcttccgagctggtggttttctgccaagaaagtgtccctctgcagcgtcccgatgaaggctggcaggccaactatggcttttgggttcgcgtcgccgttcagggagcagtcatcgcatttgcttcagcgattcacatcggccacctcctcgacggagctgctctttctcatcgacagcttgctctgtatacacttactatggcagtcatctacgttggtatcgccttggcaattgctgcgaactgggtgttccctactccgttcttgcacatgatccttgcaccgcatttcggtcgtggtagtggggtgctttcgcattgccataggaagaagcgtatttcagcacgtatcattgcagtcagccaagctgaagcaactcaaaaaaatgttcggcgtccagcttctgatgattgtcgtttatccagcataccaagtgggcaagcgactctactgtctatcatcaagctcgccctgaagaacctgctgcgagtcacgatcacgcagatggaccgaagaagtcatttttaacgtcgacttcttcggcgcagttttcttggccacaagtatgcaggccgcttcatcagcgacgactatcctagtaatcatggcgatcgatgctgctgactccgtgatcgaattgagagaactgtatcagcgcacatacaacatactgggccgatatacccgcaaggatgcagctagcgatagcaagggcagcctagtcacgtcagtccggaattgggctcaacggacgagtttgaagaagctccgagcccaagttaagggacgagttcaagtgctatcctgcataccgtaccagctatcagcagacgcgagagttctggttgagaagctacagccgcctctccgtgattcggctatccgctcggcggatatcgcacagaagacatggatgtaattgtgcagatggagcgtgtgtgctggtacccgcgtccagccaattacgtcccccactctcgacgagtgtcggacactttctcacggcagcttccattcgcgcatgcacgagaacttcaacacgctcagtgagccgctcgagctgctcttcacctccgagtgcttgattttgaccgagtatatggagacaataatcccgttcatgtataatacggctttgacgtcttggtgttggtgcacctccccagcgctcactaccactccgagatgcacggtatcacgctcaacaacgtttggagcaaggtcttgggcattttcgcctacggtctgctggagttgatattgtttggcgtgttggccaccatcatccgacgcaacagcggcatccgggcgctgtaccagttggccttcgttctcgagactcagatgccgctagtgcaagccaaattcgcgctctgggtgatgatgatgctggccttccgagtcacgcatttcggtaagaaagattagcaggaatttcgcaccattttccatgttttcttcgctaacatctctgatgctaaaggggtggacttcaccttcaagttctcgtggaggtaagacaacggcaccaatcgcaaatactcatcaagcctcatcaatagagggatgagaagctcttgctcagctaagatgagaccaggtcggacaaggaattatcatgtcgctgtattccgggggtacgacaaggctggcaatgcacccacgtaaggggtcctgttagctctgatggccgatgacttcgcctccgggatcgttcacttcaatttgcggcgtcctcgtcaagcgaccaacactacgaccaacactccaccaacttcaacttcaactcaaatcatggctcccgctgccccgccagtcgccaccacgagcaacggagcccccttacctccctctgggctcaccgcttcggccacagctggcccgcgcggccccatcgtgctgcaggacttcgctctgctggaccacctcgcgcacttcgaccgggagcggatccctgagcgcgtcgtgcacgccaagggcgccggcgccttcggctacttcgaggtcacgcacgagacggccaccaagtactcgcgcgccaagctgttctcctccgtgggcaagtgcacgcccgtggccgtccgcttctcgaccatcggaggggaactgggcagcgccgacacggtgcgagacccgcgcggcttcgccatcaagctctatacggaggagggcaactgggacctcgtgggcaacaacacgcccatcttcttcatccgcgacccgatcctcttcccgagcttcatccacacgcagaagcgcctgcccagcacgcacctcaaggataccatgatgtgggacttcttctcgctgcgtccggagacgttgcaccagcagaccttcctcttctcggaccgcggcatcccggacggcttccgccacatgaacggctacggcagccacacgtacgtcaacgtgaacgcccagggagaggttacctacgtcaaatatcacttcaagacggaccagggcatccgcaacctgccagtggacgaagctgccgctctcgcgagctccgacccggactacgccatccgcgacctgtacacccccatcgagcgctaggacttccccacctggacgctacgatgacgcccgagcaagcggccaaggagagcgtgaaccccttcgacgtcaccaaggtctggccgcacagcgcgtatccgctgcaggagcaccaaaccgaccggtgctgaaccgcaacccgaagaactactttgccgaggtggagcagctcgcgttctcgccgtcgcacatggtgcccggtattgagccctcgcccgacaaaatgctgcagggacgactgttctcgtacccggacacgcagcggcaccgactcggaccaaactaccagcagatcccagtgaataaacccctcaacgagctgcggacctaccagcgcgacggcttcatgacggtcgacggcaacatgaacgacgcgcccaactacttccctaacagcgtcggcggacctgttgaaagccccgcattgcgctaccacgcgtaccaaggggatcactcggtggtggacaagttctcgacggcggacgacgacaacttctcccaagtggggacttctaccgtaagacgctggacaccgcggcacgtgagcggctcacggacaacattgccggatcgctggtcaacgcgtccaaaccagtgcaagctcgcgccattgccaacttctgcaaggcggacccggactatggactgagggttcaggagaagctgggagaacttgaaaaaaaaacaaagctgtgcaccagaaagccaaggaactcgcaacggagccgctgaacccgccccgcagaaccttcaaggcggttgctgcgttggaaggcagctggatttgagctcactgaggattctactcccgatgcttaaattatgcgtttaaaccttttttgactttacatgttacttttggcatttctaactctcacgtgacaatttcggttgcaacgtttttacatgttaaactataaaacggttaaaacggataaatgactcctcgcgaaaagttttatcacaaccaatcactgcttcttactgacatagaagcaatgattggttgtggtaaaactgaccaaaagatgaacaacaccccgcttccgcctcctcttcaggtagctcctccgtgcgagctgctcaactgttcccggcctggcgctctccaatacaactaccgctacgtctgcagagcccacttcgatgagctgagttgtccgtacagcaccgccaacggtttcttctccacgcggccgcgaacgtcaccgccaagtccacagaaagtgttcgttcccgaactgcagcaagcaaggggcgcgcgcccatggccaagagttctactgcaagcgccacaagacgcacgtcatggagctgaccgcgcacgtggtgggccaagctctgccggttcgagaacgcgtcaacgtccatgggaacttggtgcgtttgtgccaggtcgggctctgtaagaagaaaggtcgaacaacggtggacgagaagtttgtatgcaaggaccacgcgcggctactaagggagaaggaccagttcgtggaccagagccaagctgcattcctggttcgaagggactacatcagaggaaagtgtgcaagccacttagcgatgccagtatgcaactacgtagggtgcgaccgagacaaagtgacggcaaagtaccgaggcttcttctgcgccggccatttgccggtgatcgacgacctgcggggtaagataatggccgccaagagcgacggagatttcgaggtacagatcccgctgaggtacaacgaaatcttcctgcgcaagttcctggacaagggccatgtgcacttctacaactcacttgtggccaagcatggatatgtcgcacccgtggtgggaattgtgggcgaccaacttgttggagttgcgggaggacagaagaccgctgaaagattgcttaactaggcaaaacacatacaaattcaccatcggcgcatctatcgatgtacgcgccgccagcctggacgccgctccccttctgctcgatgttcaactgcccgtacgcaggcgagttcctcttcaacgggcgcaacgtgtgcggcgcgcacctgcagcagctctcgcaacctccagcaccgccagctccacccctcccaccgccggaaagccgcccacaacttcaggcggagaagagcgacacgtgcgccttccgtggctgcaagaagagcggcctgtgcgcgcatggccgcgactatttctgccgggagcacttcacgcggctgctagtgcttgacgcacacgtggccggccagaggctcccgccgcgcacgagggtcaacaacggcggacgcgtcgtgcagctctgtcaaatcggccactgcacgaggaacggcaacagctgtcgggcggcctcaaagtgtgcaaagaccactcgctgctgctgctccacaaggagcgattcgtggacaaacgcaacgctcaggactacgcgctgcactccgcggcgagtcagacgcgggtctgcagctatgtgggctgctccagcacgagcgtggcgcagaaataccacggcgtcttctgcgcgcagcacctgccggtcatcggcgacatccgcaaccgcatcatgatggccaagtgccacggagacgaagcgatccagatcccattgcggtacaacgagattttcctccggaagttcctggatgagggacacgttgtgtactataatgagctggtcgctaggcacggattcgtgtcacccacagttcacgtgggaagtcgagggttgcagggaatctcacacggcccgcacatccggtgatggtgcttttcccactgaaacaaaaatatctctggctttcggacgcttgcgtggttggttgatcaccatgtcatattcataggttcatgtacttttatttgctatcataacgttatctcggattctagttactggtatcggatgcccatgcaaactgaaaagtgaagtcaacacctgcaatttgaccaatgcacacatacgaaatcaagttttcatgagcttttctttcgaatattttgctcagcgcgtgccaacgcaccgaagtgagccactcgacaagccagcagcatgacgacccagagtggaaatttggcctgaaccagaggcatctgcgtctcgagtacgaatccgagttgataaagggcactgataccgcagtttcgccgtagaacaacggctagcgcgacgaaagatcccagctccagtagcccgtaggcaaaaactcccaataacttgccatacacgttgctcagagtgatgccttccatctcggaatgatattgtgcggcaggaatcatgaaaatgccacagccatacatatgtacatcagaggaacaatagtcttcaggtactcggtcaacacgaggcactcggaagtgaacagcaattctaacggctccctgagcgaatttccgtcctgttgcttcgaatggcgggcacttattcgacgcagaaaatccttcgccattgatgctggatgcacggggactgctcggcgtatatcgcacctacatggtgtcgctctgtgcgtacaatggtgagtcggttgttcgggtgtatttagttcgagccccgttgggtcatcgggaaaaatctgcaaattttcaagaagagccttccctctatctgatacgcggtgaggacaggacgacatcacttgaataacaccgcgaattgcatgtggagtcgtatgctgagcccatgttcgtacttgtgttggaagttcttggctaacatcactcgagctgcagtagcgagcgaaaatacgtcgagttcgttggtgtaagcagcgcaactcgatgacggtgccgaccatgtcaaccgccatgactccaagtacagttgtgacagacgaagacacgcggccatgtacgccgcattgaaaaactcgacattgaagattacttcttcgggcacacggtcttccatatgccacacattgaaagttatgaggttcttcattgcgattttgacgagcgacaggagcaaaaccacaggcagctccagcacagagccgctaacatagcggaacgctatttcatacagatcgtcatcaggagctgcacggcgaacatttttccaagctggtgaagctgagctgtacgtgaagttgctattaataatcgaaatctgttgaacccaatagcggcaccaaaaacgagcacaagtagaactggtgtcgcgggcatcagcagcaggtgtaggaattgaataggaaagagccaatttgcagcaattcccaacgctacacccgtatacacaatcccagcgcagatagagcaaagcacaagccttgaattcgaaagagaagtctcaccgagaaaaaacgctgcatgaattgatgccgaccacgttattacgctcccttgaatgataacacgaatccagaacccgtagttagctctccagccttctgcagggttttggagggggacgcattcttgatacaacaccagcagaatgactggggcaggtgctcacgcaaccgttaagagcactcgagaaaaaaacgtccgctgaatctgctcttcgagggccaatgcgcgttcaagtgagtatttgccgccgtagtgactcacttggacggaaagccacgaatccattaacgctaacgctacctgtctgaagcaactgtgcttgccgtgactcgaatcccgcgtgtctgttggttcagggagtattcgctgctgcgaagacattgctcgagtggttgtcggaagttttctttctactactgaagtaattataaatctgaatctgagtcagcaatgcacaaggacctattgttaacccacttcgactattattcttaggaattgggtaaaccagacttctataagatacagaaggagaaacgactttttcttgattcctagtgtaggtcagtaagtttttttaactacttctctgaagtaaatacttttgaatcaatggcaaacgatcaggaattgagccaggaaaacttaaaggtaaaatcgacccctaattgcgagcatttgacgtcatgaatgttagatccaaacgaaaacgcaccacacaacgaatcacgtaccgaagtgaactacccgaaatgcgaaagtcgccaatacccaaatagcgattttatcttgaaccagcagcatctgggtctcgtgcacaaatgcgagttgatgcagagccgacaatccgcagccatggtgaagaactgcaacgtaaattacgaaataaattatttttaccagcgccagagtaagcacaccgtgtatggatgcaagtgcgttatccaccgtcacaccgtcgaggtccatgggatactgcgcgttcgggaggcggatgattgtcaaaaccatgcagcagtaaaataccggaattaacgattccaagtactccggcagaatttggcattcggtactgaaaacggcttcaagcgtgccacgtaaaacgagcgattccttgctgtgaatgctccttcgcgacccagctcctctcgttgaattgctaaagctggcgttggcttcttcgagtggttgaatctatgctgagcgctttgaccgtccaaaaggattaacctttggtgttatactgccgattgcattgaaacttgttgatgcggtatccgtgtgccgcctcacgggcttaacacgatatccacttctaaaacccgcagatttgttgcacggagtggccgctagtgtatccagcagcgtttttagcgcgtcggaaagttggtactggagaaccgagcgtatttttactcttgctttcgtctgagttctgtacgtgtccgtgttgtcgcagagtgacctgatcaatcccagcaaactgtgcgaagtagtttgtcctagcacttcatcgagtcgagcgcggatttaacttacgcggcggtagaaattgtacagatggatgactccttggcaaatatcaaacgtcgccatcgtaacgagcgtgacaggagacgtagttctttgcatgaatgtggccacgtaaagagagttgaagaattccgccgtgaagatgacagactcgggcattaagtcttctacgtgggtggtcccaatcgacaataaatacttcatcatcatcttgatacaaggcagaaacaggatcacggggatttcatagcgcgtgtcgatcacaatagtaagcagtgtctggtaggctcgatatacgatgaccatcaggccctgaatgacaataaaggagacatattttaacagttgaaccctgtctttcgccatgtcctcgaaaaagcgccaacccgcggttatccgaagcgaaaccagcaggatgaagtagaatacaggaagagctgtcaccaaaatgaaggcaataggaaaccccactgcacatgagatccccatcatcgttactgaaaacgtgacgccaacgcagcaaaaattaagtaaaagctgtcgtctcgagaaattaattcggtccacgagaaattgtgcgtgtattgctgcagtgtgagcgacgacgccagtcaagagagctactcggatccagaagccgtagttggcaagcgggccctcgctcggtttctgcagtggaatcaattcttgtacgagaaccacaaacgtaataggcagcggcgtacgataaggactcgagacagcgaggtagttcgagcgtattcctccagcgccagcagcctctccagtgaatacttcccccctcgatggctcacctgcaacttataccatgcttgaaccagcttcttcgtccagttgacggcccgattgcaccaggaaatggactgcacggtaagccccagcgtcggagcagtgtgagtggccattacgccaaacgcgcttgaaagcgctgtcgtgagtgagagtaaaaatagggtcaatttgccatgaaaagcatgatcgagggcgtacgagatcgaaacacagccaactattattatgatatacctactcaatacaacgccctactctcagagaaatacagaaaggggatcatcgaagttgtaagaaaaatgctgactcaaaatgtattgtgcgtaattcgttgttttagcaaatcacggtgattagcccatcattgaggtaggaggctaactcgtcgatttaagatagaatagctgctaagacaacgagttaacgttgagttatgtgctcactttcgttgaatggctggagtaaatccgacaatactacggccctgacattttaattctaactcgctcgctttgtatgattgctttctagtcgatgattgacatgcgttggcgatctatcgtactaaactacgtctacaatattgaaaagcatccctgtttttatatcgaggagctgcaagcagctttaaagtcagcgtttcctgcactacaaaacatttctagaagaaattttctactgctaatatatgccgtgctctgaaattcgagcttggtttaacgcgcaaggccacgacgaagagagcgaaagaaaacgtccccgccgaaatcggtgcttactattatgcaaggagttggcgccattctatcagggaccttatcagtttgttttcttgcagcgacaaccgatttattcttgcagtggcagccgctccgttcttgcactgcgatgtgcttggtactggcagttgattagcttaactttaacttagagttaggccactttcaatttagcagagcagaggcgaggccccgacagcacagtgtaccagctggagggattggaagcaaagtgtgcgcacggcactggctttacatacaaaaacatgggatcgcccatgcatggggatccgcccgacaacggcaagccaccggacccagggaagccccgccgagatgaccaggcgctcggcgacgcagactcggaggagatggattcgatcgtcgcggaaacgccgccttcacaggaagaggcttacgagcggacagaggacgacgctcccagtcaagcgcggggcgagaagccagaacgacaagaaccagagaccggcagcagcgtagatgccccaggctgtgtggccgaagaacgagaaagcgggacatcatcccgagtggtcacccatcgagggaggtctgaacgtccaaccagaagaaatcttcgacgcgttagtgaacgacatgagagcttcaccggaagtagcgccgccggaagcgtggaagttgaccgtggctgatttattcgcaacggttttcaagacggttgaggtgaaaacggagcgtataccgcctggaaagcagcgctaccccaagctcaaaggagatgaagcgtcctgtatgctcaaggtattcgaagcggtgtgtgttacgggtcagggatcctacaccgaatggaccacatacgcgacagtgatcagccgagatctatacaatacaagctggaaccttaccacgatcttgcaaagcgtcctcagtaaggttcggtgggcaagagcgccagtgctcaaccagtgggcggcaaaggtgaagcaagggtccgatcgctcttcagctccagcgacaagcgaggacccccaggcattcccagtgttcatgtttaatccaggcaagtactcaagcaatgacatcgaacgcttcaagggaatatgcacgcgaagagaacccggcagggcgcagcaccagctgcgcgagggctccgatgatgaatggaaaatcattcaaggtctagcagaaggcagcattgtcagcaggcgtctgccggatttcatcagaagtattctagactctcaagagcggctgcgtctgtacagcacgattcaagcgcaggttgaaggggagctcatgtttgttttgaacggctatacgggcgtgcgcgtaagccgccagcacacacgtgcgctccaagaagacattctgctcgcagccgagcgggctaatgtgaatttgacggagctgcatgggttgctaagtcaaaccaaaacgataagcttcaacagagtcaagaagtcaatccatttcttcttttttgatcgcgcgacagctgcgaggcatgcactgacaccagtgccgttcaaaggaagagtgtaccgcttgatgaacgtacacgggcccgaccgcggaaccccgtgggagcgccagttaggacgcgctggtgttagtatgagtccgccaacggaatacgaagtccgtctataaaacatcacgcgcttcatggacatcggacgactgacagccttttttaaaaagcacagtcaggtcgaaatcgacttcgaggatctggatgcctgcacgccgaactctcgcacttctacattgtggaaagtaacattcaaattagcaggatgcccagaattccagcggggaatccaacgaatcatttgatttggggcaagcattgtgatcaagcacccggctgtaggtcgtcgcctgtagtgtctacgttgcgggcagctaggacacactctcgcgcggtgcaactacacggacgaccaattaagagggcaaggaggactggtggcttgtgaagagtaggtgatcaatctcgtggacctagccaatccgtacggcagcatgaaggaaatgaaggaggcagcagcaaaacgtttgcgcctgcaccagcaagcggaacgagcagaggaagaagccgtgagtccgacggcgaatggccacgatgtggagctcggaagaccgcagcgagatctcgaaccggcgtccgatcaggcaggagagccgaaaggagatcaccaccgagaagaagccagccagcaacagcaggcacctacgcccaagcctcaacccaaatgggtaacagtcaagctgaaagaaggacggaccttgttcgcccacaaggcagccctggaccagaaaataaggccagcgcactcgcgatatgacgtcctagctgaggacgaagatgaggaagatgacgaggaggataggaacgctggaatcgagccaccggcagatcaacaccaggaaatcatcgatatctcatcgggatcgtcgcaagaaaccccaaaagagcgtctctataaggatcttaccaaagatgaaaagagcctgttgcacatagtgagacgcacgccgccggcggtgccgacagccccgcaactagtggctttaaaacagcgtgaacgccaggagctactaactgtggtggaaccgctgctaccaaagcaactcctcaacattccatgggatgcggtggtccccaccacgattgacaacgttgaagtggtcgaacggctactgcatatacgtgaggtgacgacaccatcgacgggcaattgcatggcgatcgctatcgtgcaagcagtagccaaccacgatctcgccgctcatgacgacgttctgactaaggcaaccacctcaatcaagcgaggcatcaaacacgcaggacagcttcatatgagtgaccagttcgatcactacgcaaggacattgacattagtgaatgtgcagcgagggtgggaaaacatgccgccaggtgattccaagaagcagtttaagtggtacttggaggagtacgctggaagtgcttctgacagagacaccatggttgaagggttcaactggggtggcagtgacctgatggcgatggcagtaaactttctcaaacgatcaatctatgtattcgcgcacaacacgcaaggtgaccaagcgtggaactgcgtgatgtatagaccaagctcgcggacgcgattcaaaaaggtctccgaaaccggtcaacaggttatgctgacagtccaggattgcgtccaacgtattcgggaggacaagctgaaagcacacgcagcaccactagtcctacgattttgggggcgtcactactcggcgttcgtgcacgtacagccacaaggcacagatgtagggaagcgggaggggacgaagacggaagattttgaaatggaggatacagagaggattcccggtcgcgaggacgggtcgtcgcgatcgcaagccgaagccacagcggagccatggaatccggacgaatggggtggctcgctagatgaactgcaccaccggctgcaaggcatgacgataccacacgagctcaagtgtgaaattcaacatatttacgggtagcagaggcagatcgataccatgaactcttgggattcctagtcaataccgtctcgaaactttcagtataagagcaaaaccgtctcctgagcgccgccctggaggacgaagcgagcccaaccgttcgggaattccttcagcggcaccaagtgcctttagtagcgttgaagcaatggcaaacccatgtgcgggagatcaaggaaggagcgctggaccgagaacgagatcagatacaggaccatagtgagaaatcaacaggtagcgccacggatcctcatgacgaggcctacgtcccatccggtgacagggtcagcagcaaaccaagccggcggaaaccgtacaggcagcagcagaagaagctgaggcacagatccaagaagataatgcaaaagagggatcaccgttctgctctcgctgtgacaaacaaactcggcgcattgtacagtgccaaacctaccgcagtcgggcggaaaaaaagaaagcgtgaagtgacagaacccgtttaattgtcagcgccagtcgtcgcgagaccggactgggaacaccactggaaattcttggctccggagtgggcggaaggagcacagacgccgttcccgttggccacgagcaacaacgataagtggcaacgagcagccgaactggaaccacgacgactgatccgacttgttgcacggtttccgtttgcaaccgacgtgctgcaagctgtgagtgatgatgttctaatagcatggactacggcctggcggaaagattgtatgttagcgggtttaatccagtatcgtggtcggactaccgacaagtcgatccacacatggcttgatgattggactaagcggctagcggaaccacctacaaaggaaaagcgtgccccgccgtttgacaactgcgatgactggaagcgaatgcgttcgcgagcgtacggtgatgactcgctactccagcaatgcgatttcggccatacactcaagctcgctcaacatatcttgtgcgccattatctacgatcccgaaattcgcgcgatcactggtacggaagatgacgtggagaacggcgtaccaactcaagtacggcgtcaccttacggccctggacaagatcgagagttacaaagctgcgtattatgcggcagaccggcaaatcaactgggcagctgtggagagctgcttcacctcgacattcgagagggaggagctgcagctagctctccagaattaagttctccttcagcgcagtcacagagggtttggtgcccatggacactgtaccctcggatgccttcggacggcacttccgcctacaggaggcatttggtgacagtaaacggatcgctattacgctttggtttttcgaaagaattcgtagatatgttacgacgactgcatgatgggactacagctcgctttctggtaaatggggaactctcgcagccgacagaggtgctatcaggcagtcgccaaggctgttcactggcgcctttgcttttcttgatcgcggcagaggtgttggcgctagctatctcacaggactcacagttgcaggggatcaacgtaccgggcaaaccggatgctgagcaccgcttctcggcctttgtggacgactcgacggtgttccttcaagaagccaagcagctcccgtgggtgatggatataattcggcgctttggagcactgtcgggcctaagtgtccagcccacgaaaagcaagttaatgtttctgaatacggcggtggagatgaatgagctatatggaataccggtactcgggcatggagaaactactcgttacttaggttacgaagtaggaactcaggagctatcgggtcacaactgggcccaccggatccgcaatatcaaacgaagattagcaacggcggcgcagatggctacgagtgtatatcaccgggtaaccatcctcaatgtgatcatgctaccagcaatattgttcacggccgcagcgttcgatataccaccgtgggcaggcaaggaacttcgacacctgcagaagcaattcctgtggcgccattcgatagaaacggaagcaagcaggcataaggtcaatcctggacttctgtacactccacgaggcgccggaggcgtggggctcgtatcgattgaggtggccgtaaaatctcaaaaaatgaaacatgcgatgctctggctaatgcagcaagaggatacgtattccgcagcatggcgagcatggacattcaggggtggggaggccgacagtgataatacaataacccttacggaaaccgggcgacgacatccgaagacaccttgcaaaaggatgcaagagctgctaggcgggtggcttcaacccacacaggaagagaaggagactttactaaggcaaggtacacgggacctggcccggttagccgaccaggccatttgttggagggacgataatacactgcagatcaggctttacgaggaacttcctcgttggcaacgggagtggtcgactgaagctaagacattctggcccacatacctgtatcggtccttctcctccagcagcacggcgtgggccttgcagacgagcatcttgccgtgtgggagcagcccctgcctctggcagggccccacttggcacagccgcacgctctgcttgcgggagtgacggtagcgtacaggttgaagttgcccttcaacatgagtggagcagtaacccatggattcgagaagcaaacgggggcatgctgacagccaagaaatataaccggacccgcgtttgcacgctacaggagttgcacattcagcgaataggactggcggcgtatacgctccggatttcattgacgtcggacgcaacaacgcatcatacggctccgaaattgtgtcggtgggcattggctattatagcagggtccccaccgatagatatcgcagaggaactgcaggtgcggtcaacggtggagcttcggcaaccaccgaatctgcactatcattaccattggaaagtcctagacactaaactcgtcgaacgggtcccagaaggaaccgacggcaccgacggaggatattttatcctaaaaccagaaccgaacggcgttcactgggctatccaacaagcgtataccccaacacccaagatggccgacgaatacgatgaattagcagcgggtagaagagggttggtgtttcaagctcaccccttgttccaccgcttcccttggaaactgtgtcaaactgcaatgtcttgtctgcaatcaagaaactaccattcaaagcgttcaagcaagaactaggacgcgagctacggtctgtggtcgcacgcttggaaacaactgtagcggcggatccatggcagcgcggagctatgcaacaaacaccgaagcaactgtgggctcacaagaattcgattacggaatatcaagtatgggtaagttacagagcggcaacgaagcaactcaatctcttcttcgacggccgtgaaatggatgcaagctgtcgcaagcttcaaagctgtcagcaccgaaaggagacactcacgcacctactttgggagtgtccgggcgcccaagcatgctggaaatatcttatcagctgctggggtagacgaaggtgtgatggccagcagcttcttcggtatacggcgaattgcgcgtctcgagtaccaccaccgtttacaacagacctgcgtcgtcgatttagcatcgcgtttcccgatcagaccgacgactacgcgcgtgaatagaaacggatatggtgggttatgagcacagtatgcatgacagtcctatggacccaacgaaaccaagtggttcacaatgggggccaggttaccattgcaagcagcgtcgcagcattccaacaggctggactccggcaactacgagcactagcacgaagggaacgcggaaatccaaggacaatagttcaaggcacaagattacttatctgtttggatctcttccagcggacaccaagagaggcacctcgaccagaggcgccacgtacagccaccggaatcatctcgctgatcacctggcttaggacattccagacactctcataacatagtctgaacctcctcaaacttagagttaggctgcgagatatgatcaccgggaaggatttgctcgttggtttagagcccttaatcgcatgccaaagttcgtgcaaagcacaatagtcattaccctaaactctccttttttgcagcgtaaaaccatccgtagcaatgagcagcacccctcccctgcctccaactcctccatgcgtgcttttcaactgccccaagcccggcgagttcgagttcaaccggcgacgggtgtgtgcggcccacttcgagcagctctctcgcccttcagccgccccccccccaaccagctcccgtccctgtggtcgctactccagaacccattcgtcgtcataagtgcgccttccctggttgtaagaagcccggagtgagcccttacgcccaagatttcttttgccgccgccacctaacctccgttctagtgctggacgcattgaccaagacaaagcggccgagtacgcggtggacaagtccaagaacgagctttcgagtcgcacccaagtgtgcaactttgtggactgcaacgacgacaacgtcacgtacaaataccacggggtcttctgctccgagcacttgcctgtgattgacgacttgcggagtagaattatgactgcaaagtgtcatggggacgaggccgtgcagatcccgctccggtacagcgagatcttcctgcgcaagtttttggacgagaggcacgtgcagtactacaacgagctggtggccaagcacggtttgtggcccccattgtacatgtgaggggagaccagattgttgggctgtcaggtggaccgtgattcttatgcattgtattggcgtgaagggagatttttgctgcagctgagtgcttgttcgcttgcgatccagccgaattgaaatgcgagacgaccgagatcgtggagagaccgaggtgacgcagggcaagaagcccaagccgaagaaacttatgaacaaaatccatggtgttaatttggaggaggccactgcaagatctcgcaggggtcaacgctcgatggaaagacccctggtaagcacgaatactctcgagctgagaagagatcatttgggagtggctcacgtctactgtatagtgtgacgaagttgacttacgtctcctttgaactcgcgccatttgtaggcgtcctgatgattatcaattggccgttctaccgtacatgcagcacgaatgcacgtgtaagcttagctgtcatatcaagtttcaagtattacttaagcgctggaacctctgatcagtagaagctcgtgctaatgaccggcgcttccttcgcagggctgagcttctccagcaccttctggcccatatcggcatcctcgagtttctgcagtagtttggcgttcaggtgcttctctcggctgttcatgagtgtgcggggcaagtggagcggcgacatgggctggccctgcctctgctcggccatttgcaccatgagcttctcctggaagctcttgttccgctgccgcacaccgcgagcctggcgctgctgcgcttcaatagcagctcgaccctcggcgtgatactgacgcgcaaatgtaagatcgtcctccacttcctgacgctctcgctgcttcttatgggctcgctgttccagcagaaattgctgccgctcgagagcctctttgtgcttcgccgcctgcttctcctgctgcttgagcaactcggcctcatctttcttcttctggtattcctcggcacgacgctcgtcgtccagcgccttctgcttcatttgagcctgcaaactctcggcgatccccatctgctggtgatcgcgacgctggaggttcgattgcagtctgcgcatacgctcctcgtcttcacgagccaatcgacgagcatacgcctccatgagttcgacgtcttcctggtgctcctgcagcttcacgcggctcttgtgttgctggacgagggtgttttcagcctgcagcttcttcattcgagcgtgttcagtctcacgacgacgacgcgcgtcagtctcgagccacttgagctcggcctgcacgcgctcgacctcggctgcctcgtcctgtttgcgttgcgcttcacgctgctccagagccattttctgctgcctgagctgctcgtcgcgctctcgacgcaccttcatgatgctctcgtgttggcgttgcagcttggagctctcctgctccttccacttgctcagatcttgcacttggtgctggaaggcctcgtcgttcatcctcttctcgctgtcgcggcacttggccttctcctgctgctgagcgtccagccaggctttctgcatgcgcttcttctcgatatatttggctttttctttctcctggtcgctctcaaactccacgagggtgagggcgttcagcagcacccactcgtcttgtcccttgagagcgtccaagttagcgggtggactcttggctccgatttgagctccggcacttgcggaacttcgagttgtctccccgttgacacctacgccaccattacctcctttgccatcgttgttgttgcctggctgcttgcccttctgccgctccatactcatcttctttaccactgcttccagcgccacaatgtccccctccatgacccgcttctgcgagtgcaacaagagacgattcgccatactggtgatggaattggcgaacaccgggtcctgcttggcatacttggccgtgagtttggccgccagcgcgtccgccaccgcttgtcgtttgtcactcttcacttcctcctgacaaaacatgaagaaagatgctgttagtttttgaaatgaatgaggggggggggggggctgaactgtgaaatccatgacgtactcgaagcagcagagttacagccttggcgcggttgcccattcccggcttgatggtcgacttccagcgcttgtccatgggtattacgcctcgacttgagagagtggggaagtgttccacgtcatggaggtgccgctggtattttggacagaagtcctggtgacaggaatagcaaaagagagatcggctattttcaagcacagcaaccctgcgacgcgcgcatcgtgacgtgcatatccaaaaagcacactacttttcaagaacacaagagacagagtgtataacttagcaccacttctcaatgttttgctggttccaactcatcccaaatgctggagaaatgcaaatgtaaagtccacacctacaacatggattacgccgttttgttagcccatacgtacgccacggcaggaatcaaagtaaatgaggcaacgcaccaaaatgcacgaggcgaaagcacaaagtcaatgctgtccagaatatccacttcacctggatcagccacattcgagtctccaagacaaatgcaagctggtgcagcgctcgcatcccgcaattacgtttgatcactgctacgagaacccctagagacgccacttgcaagattccgaacgtcaataccggtagaacggtagagaccgcattgtcgctagagacccgtcccatctcggaatgatagcgcgcgttggggagattcaatgatactctccaaatacgccgagataacgaggcattccgtcgtgaacagagccttcagggtttcttccaaaatctttgagcgattgctagacatggtgcggctcgagcaggttttcgataccaagtggttcgcgtcagtaaaagtctcatgcgcggttttcacctgaatagggagtacaggataaattgtgctgttgttctggcttcggaggctgcaaaagcaccgcggacgtcggtttgaggagctggttcgtgggggtagaataaccgcatcagctaacgggtcaaattgcttaagaaggtggttatccacctcggagagagtgtgcggcaagcacgagcgtatgcgaattccagtgcttctttgcttcacaaacttttcaggatctcgacataacgagcagacagccacgagcaacccatcgtccttagatgaagctttagtaacctgtttcagccttgaaaggattgtggacgtgcggcggtgaagcccgtacagcatgatgagtgtctgggtcaagtccgtggccgtgataatggtgatcgtggtaacggaagacgagctctgcatgcatgtggccatgtacaccgcgttgaagaagtcgacagtgaagatgactgcttcgggcgtcatatcttccatgtgggcggtacagcgcagcatgatgttcttcagcgccaacttgatcagcgggaggaggagaatgacgaaaagctggtaaggggatccctctgcaaggtggaaaagtgactcgtatgctgggtagaggaacacggggatgaacttggcagagatataagccacgaactgggccagcttgtcccgacgcgccagcatttgatccagcgttcgtttacccacaacaagccggaaggagatcagcagcaccacgtagagaactggagtcagcgtcaccaggaaaaacgggatggggaaaatgaggcgagctgctatgagcaaggcgcacgagatcacgcccaatgatacacaaagtgacagtaaaatctgccgacacgccgagatgtgaatgccatcaatgaaatacgttgcctggacagtcagtgggggaattccaacgaaaatcagcatcgtcactcgaatccagaagccgtagttggccttccagccatctctggggttttgtagaggcaccaacttttgtgctacaacgaccacaatcatcggtatcggggtcgcgacgcataccaaacatacgcgcaggagcgaggtatttttcgtgtaggcttccagtgccagcacacgatcaatcgagtacttgccgccgtaataactgacttgcagccgcttccagaagcgcaagagctgcaagccccatgcagctatcgtagatcccatgagcgtcgtgaatcgtccaagaattatcgatgaagccgtggactgataggatggagtgcgttgtcttgctctattcgtggatgacttaactcccccctgtcactttgtcaagtcgtctctcatcgtggctgatcccgctatcagggtgtgatcgttcttacccaagcagggagtcaatgcgttgcttgacctgttcaccattgtgcatcaactcgagttcacattgaagcgcccgcagatccactctctccgcgagactttccatgacaacaggcgatcgagcgaagtccttctccgtggttacaaccaccacagcatgcccatcagcttccagctcactcacccagctcacaacatcagaggcatctccctcacagaatgcgtggtggtcagggaacgctttgagctccgtatgggcccagcgagccaccttttgcaccaccaacttgacggactctgggttgcccacgccgcacaccacaagagcagcgcgtccatccaagcacactcgctctgcatcaccacctctgcttccactcagcagttgagtagctggaacaagcctcaccaccttcatccgagaggtggcaacaatcggactccggtgcggattcatcagcgcccgcaaaccagtcaacaacgcccgcgtctgctcttcctccagtgcatccgcgtggtgcacaaccaccacatctgctcgatcaagggcttcacgtggcagctcgcgcagacttccacacggcagtaacagtccgttccccagcggatgcaaggcgtccaccatgacgatctccaggtccttgaccagtctccactgctgcagaccatcgtccagcaccacgcagcttaaaggtgctgcgtctcccccgagctccttcaccttagccctccccaccgccaagcgatcacctcccagcgccaattcgcacctcgggaactgcttggccagcatccgccactcgtcgtcgccatagccgcgactgagcagcagcggcactcggtctcctccgccgttcttgagcacgtagtcgaccaggaactgcacgaacggcgtcttgcccgtggctccgaacgtcacgttccccacgctcagcacggggacgcggcgaggagcgacgcgctgcgcgtgactcgcctccctgcggcgcgtgtgctcgatgatccagccgtagacgcggctgagagcgggctgctgccgatccgccagcgcctccaccggccagcgagacgagcgcagcgctgccagcacggagccatgccagcgtcgatgccagcgccgccaaagctgcgccatacctggaacaagagacgagtgagcgtgtggccataaacggtcggcagagcgagcgcctcaatgctcttgacgcgcttgctgtcgacgctgcgccccgcagccagctccagcagcgtggcgcgtcgctgggcgcctctccaagcccccaatgcgctgctcttccccagcctcttctcgtccagcgacggccctgtcaagcccaagcagcagcgcgccgaggtggagctgcgcgaggccgacctggacgagtcgttcgtgaaaggctcgggcaagggcggccagaagatcaacaaggtgcgcaactgcgtgctgctgacgcacgtgcccacggggctgcaggtgcgctgccagaagacgcgctcgctggacggcaaccgccgcgccgcgcggaagctgctgctgcagaagctggacgaccacgtgaacggcgcgctgagcaagcgcagcgagaagatcgagcggctgcggcgcaagaaggccagccgcagggccaggtccaagcacaagtatgccaagccagaggaagggcagggggaagatgacgagcaagaagacgaagaagagggctatgacgacgaagagggcgaagaggacgacgatgacgacttcatcgacttggagcagcacaggttcaaagccacgaagaagaaatgaactaacacgaaccactctccaccaacgaactattcaaacagagcatttattcatcaatcaatgaggctgagctacgtccgcgaacaaggagcttggggctccgttggcgggcctagctgagccagaactcgtccttgacactaatctctcctgccttgagcttctgccaccgctcgtgcgtctccgccacgatctggacagcggcctcggccgacgtcggcttctcctgcgagaagacgttctccgacttgccctccgggatcttgtacttcttgagccagtccaccagagcgtccaacacgccgggcttcacgctctgcaggtcgctcacgctgttgatcttgtcggcgtcctcatcggcgagggcgatgacgacgatcttgtggtccacctcgccctggtcgacgagctccaggctgcccaggatcttcacggggttcacggagcccatgggcagctgcttggcgccgatctcgatcacatccagcgggtcgttgtcaccgccgttgccgttctcgtccttcacgctcgggtcctcccacgtctgcgggaacaggccgtagttgaagaaaggcacgccgtacaggtagtcgcggccgcgcgtgccgttgtgggtcgtgtcctgcataatggggttgtaccggtcctccttgttcacctccatcttgtgcgcgatgcccttggggatctcgacgatgaagttgtacgagctgttgtccttggaatcggccgggtgcagcgggatgtcgtgccacggagaaatcttctcgcccttgtcgttcttgaagtggagcttgtagtcggtgcggccgaacgtgccctcggacgagaacgagcgcgaagtgtccacgacaggcttggagaactgcgtcgcgaacgggatccaacgcgggctgtcgatgttctggtagtagtcgatcatgatgtcccagccagacttgaccatgaaaccctgaggcacacacgtcggcttgtcctcccaaccagcggggatcttgtcgccctcgcacttctgaagaccctcgcgcgccatcttacgcatacgcgagcccgaaatggagaggaagtcctgcttgcggctgctgtccatcggcttcatcttgtggtcctgaacgtcgtagtataccttggagaaggacaagatgttgaagtcctccatgccaggagccatgtgaagcacaaagcggccgtggtcaccagcgtagatgtcgtccttgtcgccgtcggagcgcttgataccagcggggtcacgtccgacaacgaagaagctagcgccagcgttcttacggctcttggcgtgccactgcacctcacgaggtccggcgtagatcatcggagacggccagatagcgagaaccgtgctctccttgtccagcatgccgtcgcgcagaattgcctcgtgctgacggacgcgcacatcaagcgggacatcgtcctccttcgtccagccgccaagaggagagagccacaacactgggttcttgtagccctgcgcgatcagctgctcacgggcgttgttcatcaggtacgcgtgtccagcatgcgtcgggtttctagtctggaaggccagcacgacatcggctcccatgtcatcaaagcgcttgcgcagctccgtcggggtcaggcggtactggtcaaggtcgtcgttgtacttgatacgggacagcagctcaatctcgccaccgagcaggaactcacccgacttcaggatctccgcgatgtacgggtggccgttgtccatggcgccaaaggtgcgggtgatgcgctcctccttgcggtggtcatacacctctgggtcgttcagcagcgccaactcttcgccagacggactcaccagcacaacctgcttggacttgccaatgcgctccttggctgcgtcgttgatggggaggacgatggggacaggcatgttcacgcgctcgcccttggacacgaactcgctcgagtattccgagaagttggtaggcttgtggagggccaagtggttgtccgtaaggttgtccgaatcgtacagcacactgctgaagtgcagcgactgcaggtacacgccctcgcgcatgaagccgcggagaggcgcagcccagccctctccaatcacctgaagccagtggacgtcctcatcacgaaggagcacgcgaggaagctcgtcgtagttgtcggggcgcgatgctttcggttggtccgggaacagcgtggggaacgtggcgacagcgttgccgccgtccgcgacagccacaccgggatatccactaggaggctgctccacgccggtgagcagtccctcagcctccagcttgtccaggatcatcttgacctcgtcgtccagcgactgactggaggcgttgaggtggatctccgggttcagcggctcctcgtagggcgacgagatgcccgtgaagtccttaatctcgcccttcatggcgcgcttgtacaggcccttgacgtcgcggtccgcggccaccgacacgggcacgtccacgaagacctcgtagaacgggatgtccatcttcttgtgcagctcgcgcacttcatcgcggcgcgcgcggaacggggacacgagcgccacgagcgtgatgacgccggcttcggagaagagcgcggacatctcgcctacgcggcgcacgctctcggcgcggtccgtctcagagaagccgaggtcgcggttgagtccgatgcgcacgttgtcgccgtccaggcggtacgtgtgcacgcggcggtgcagcagctccttctcgagcgcgcgcccgaccgtgctcttgccgctgcccgagaggcccgtgaaccagagcgtggcgcccttctgctgcagcgccgcgtagcgctgcgggcgcgacagcagcgacgagtcgtagtacacgttgcgctgcatgtcgagcttctgcaggcgctggtcggcgcacacctggtccacctgcgtctggttggccaggtcggacagcgccaccgccggactgctacgcgcgccagtggagggcgcgcccacgcccgcgaagagcgcgagcagcaccagatagggcatcaccaccagcgcgcccagcacgaacttcttgaccagcgcgcggcgctcatcgtggtccgggccgcgcgagaacacgcggctggcggcggcgtcgttgcactccaggtcgtcctgccccacgctcgcgtagagggtgtcgctcatagctgccgagaagcgaagccaagccgtcgctcgtggcttcctgaagcagattgcggaatgcggaatgggaatggctgctcgaaagtcactgagaccgagccagcggatatctaacagttagaaatcggtggttaacctaaacctaacgggtcgttttcgacggttcatattggtttttgtatgctccagttatacagagacgcggcataacggttagctgactaccgaaatggcttgacaaggatggtgtgctctgcgcggcgcgccgatcgagtggccttcagcagcgctgcaagcagtacgggaagcactgcagcaataaggtagctaggtcggttggggccgtttacgtggctggccttgcgcaatatcatcgctgaaggatggacggcgccgcggatcgacgcgggtttcagcaatgcgctgatttgctggcaacttcgacgaggggttgctcttcgctctgattggctgcccaccggaacggcggcaatttatgacacatgttgaagctcttcactgccgtcgccacgtttggtggtggccgcaatccaacggtgccaaactgaggctattagccgcgtataggcagcttgcagtcgcaatcaagtcaacacggcgatccgttcaccgttcggcacaagtttccctcgctgtgtctcgagcgtgccaccctgcgtacgactcaccaatgatgatgatacgccagtccttctctccagaaaccagcgtcgcgctctccagtccccttcgtcaccaaggactgtaagccctcgtggatgtagtgtgacgaaggcggatctgtaccacctcgacctattggataacaaggtagacagcagtgccgcccgcgtacttgcgtcgtaatctggatcgtcgtcctctggattacagacatttcatcttgccagcgcccgatgatgagctcgtacctcgtacttcttcgcgcgaatgctacaccccaactacaagtgtttattcggggcacccgaactgttcgcagttcttaggagcaataagataccaacgcgaagttccgacaacacggatagacccgccaaaatcattctacgcgggtttataaactagctgcaaaaaagcaactgtgagtcacagttgcttttaagtagtcacagtctgtgactacttgaacacaaccagggctcagcgaagctgagataggaggattttggaatacgagtacttcgacttttttgttagtttttgagctaggaattacttcttttacgatccgcaggcatctcctgcgcctgcttcgcagccgaagtgcttgccccgtacgcacatcaagtaaaataacggtgaaattgagtaaaaactcacaatttatcgctgcctcactgaaggcacaactagtgcatgacgccttaggcttgggtggtgtgctcagaatccggacatctcactataccgctaagcgcaagttgaagtgggtatgtcgcgcgaaagtggcgagaatgtcgttcaatgacacacgcgcctggaccgtagagtgacgttgtttcatttttcgatttggggcaatttactctcagcgataccgggacccaatagtttctagtcaatgcaaaaagagtacccccaacgttatttgctcaaaatgtagccgcctcagaaggaacaaaaccagacttagagctctcaaacaatgcctacactctaatgccgccaaacgctcggggccttatcagaaagtattatctcttcaatgaaaacattggtggcatgccttcattgactggttgtcacttcttggagatcgagagtggtaatcgcaagcaaaccgctacaaactaacgttagctataactttcttgtattacatcccgctcatgaacttcttgcactcgaaaaagtttacggaagaacgttttagtgtgatatttagcaaacaacccctgaattttatgcaataacaattcgtagcttctagtcgtaattgcccacgttctagtcgaactttccgaagtcgattgattgaatcgaccgagccaaatcgccagcaaaccgcccaagattttgatttgagttgagtttactatgtacgcaataaagacgaaataagaagtcgctcaggccgtctcggccgattccaaaagacttgaagtttgtattcagcgatttcaacccatatggatgaatatcgtgacggtgccgacatacaagaacttgacttggccactgtatggcggccatggcccaatcagatgaccaatacgttttttcagcgaataagcatccggtagatccctatttaggccaatcaacatggttagggttaggtatatttgctgccgacactatgccgacgtataatgtcggcaacgcggccgaaatatgtattcatcccataggaaatctaagtaataagggtataatatacatatctgttctgctgccgacaagttacttagcttttgtattgcctttgacgagctgatttgagccgtttgcaatagcgattcaaccattatcacgaactcaatcgagtttcctgggcacgcctatcgacctacccatcacatgaacaagcagcactcagtgagagctgctcattcaggagtgtcgctcaggcggagcttgctgcatgccgcacgagcgaagcgctaggatccaatgcagcatatacaagaaaaccattaatttattccatttattatcaatagcttattcctactcaagagtactagacgctagtggtggggtgtgactgcggagcattccacctgcagctaccccaccaacagtgccagtccacacagcagctgcagcaccccaccagcgtcgtgttgttggtgccaacaccagcacgcaagccgcagcaagccacagcagccacgccctcctcctgctgcacgcttccctatgctcgtcgcctcccagcaggtcgctgcgcccttgcgctcgtttccctccgctcgatgtccttaccgccctcgccttggcggctaccctccccatcgccccacctccggtccgccgcctcttgccgttcgctccggttctcctcctcctccttcccgccgtctatcctccacggcgcggccgtcttgtcctgcgccgccatcttggtgcctaccgccctgcttcaggtaaccgtcatcgtcgtgctccgcgccatcttcctagcctccaccgcggaccactcgcccgccgtcgtgcagcctaccgccgtcctcccagacaccacccacatcttggcaggcggaaccatgcagcccccctttttttccgccgacgtccttcggctcgccgccctccttgatggcgtcgcgctcctccatccccgctccttccacccgccgtccttgcggcctggcgtgcaccttggaattgacatttgagtcaaatgatttggccaatagattaaccgctcaactaaatgcttatttcaaccaatcacgacactatcggccactgttggcaccgtcaacgttttgtcgttttgacttggagctctcctcgatttatcattaagtcgaggtcgatttaataaaacgaggtcaaagaaagggacagatcgatctatttaggccggctaataataactcgagctacgacaatccaaatcagggctcgaggtcgatctcctggtggatctgggcagaatgaggtcgatctacggtaaatcgatcccttttgcgttttcaaaagcgcaattcgaggtcgatctaagtaaatcgagctaccgcctctgttttgtaccctgatttgtggaccggccttcctcgatctaggccataaaacggggcgacattttatctgcaaagcacaataagttaaatagtaccctataggaccactgtagccgaagatacttaagtacgccgcggagacgtctccttgctacgtctgcgtcgatctgcctgcatcaggcacggtcttaccaaggcgtcgtacttggtgctactagaacttggtttatccatattcacacttactgtgtacttcatttggcctttgaatcctcgtccatcggtgtattaggcatggtcccatcatcggctgctaatgtaaacaacctattttggcagtaaagagagagttcttcgaactactacatcaagccgagcagttcgtacagtatacttaaccaccaagtcggctggtgttgactggccctaattccgacttgttgtgtcgtttgaggcttgatcttgctagcgtttggtgactagatgctgatagatttcaaaaaatcttaggttaacgtactaattaacacagcgtatggatatctcgtcggcttttctcagtttcttgatgaatgactacaggaaatgggcagacacgaacataggacaagaaatcctcatgccctcttctctctaagcgaaaccacggcttagcttatactaagtagggacatgcacattttacatatcaaacccactcctcttgctcttgaggatggaagggggattagaagttcggctacatggccagtaactcaatacacctcaacgttactagggcttcgcaaaggctgggataggactggttaactcacctttgaccgccattgataaactcaatccgcacgtgagcgtccttctcctgcgcctgcttcgcagccgcagaatctgcccgacaatgtatcacgacgtaaagccgattttagagcaaaatcaataaaacgaatcttaactcgacgaatttgcaaatgaactggaccagcctccatcattcttgagaagtctaaaacacttggtcaatcgacatcatttactttaaattgacctaaaacatgttaccggtccatcaccggtggcgattggcgcccgaattaatcctgtttgggctgggctatcagcacttcgtcgctttctatcccagtattaaaaaaaaatctcgtcggcaatgtggtgccttaacaaaccatgcacccgaaatgtatacaagtcgtgtctggtaagtactaataccaacacgacgattggcttatcgaggactcctcgaggagaaggaggagggggagggagaagacgatgattgtgtagtaggcctccacagacgtcgtattcaacaaaaaatgaattgtaagtcacacgttttttgttggtgtctatggtctggtgcataaatcgaagggctagcacggactgcgagattataccttctgtatccgctgacatttctgtttatccgacttctcaactcatagtttaactcaactcaaagcctgatttggtgagtgcatcaagtctccgccgtcgtatcagtcccgtcccctcacgtgtcagacaagagaaaactaagagctgcatcgatttcagtttactgtatgggcttttctccgtggccccaggaatgcgccatgaacgctgcgaggcgaaacagtgatatgtatcggaagctgcacttcttgtgaatatcagtgataatattagtattattagtactattagtactatcgctcattttctgggtattagtattaatatatgtggttcatacagtcaaacctgtttatatgaggccctgttggtgaccatctactacaatgactcatataaaatggactcagttaaaacaattatgtggtgcacgtaaagaaatcgtgcatagttcgctgccgctttgccttcaccgtagtctctcgaaccaaagcggtcacggtctgtaaagctcttcgttctctgtcagtctgctctccgcattgcagcagaaatgcagccagctccatgcagtgtctcagagcaatggcaggttgaactgcgggttcctgttcctcctcttcctcctaagcgctccgccagctcatgcgccttcatcaggagcacgtcgtccgccatcgccgttttagcttcgttctgaaagaaaaattccctcagttcccgctcgaactgagggaatttcactcggcgccgcttggtcgcactcaggtcgacgtggctgaagtaggaagaaggcaggttgcgcagtcgggcgagtgtggcacgactgacccgggccttgaaagttgcgtagatccactcggcgggcatggggttgttcatgccaggattctgctggagctttaggtgcacttggagcttttgttctagcgtcagacaggtgcgaggagacatggcgagcgaagaaagcttgcggtaggcgttgagggttgagcagtggtgctttgaagagtgtgtggccgtgagcagtgtgaatcaaataaacaggtgagacctaatttggtacccaaaaatgtgactcatataccttgtatgtatataaacagagatcatacaaaaactaagtgaaatatttggtagcgacaaagcctgcatcaaataaacggcatggctcaaatagagaggatcatataaacaggtttgactgtagatgttaatattagtatcactgacagtgatagtgggttaatgttaagtatgatattagtattagcatcacttagtagcccaaaaataccactactaacgatccctgacacagtactaagttatccctggaaaactcgagtttttcaaattgagaagtcggtttgtgcagagcttcccccgcgaccggccgcacacacgagaagttttcccaagtgagtgctgtgtgcgagttggcggtggctagcagagaagacaatgggaagatatttgagtggtaggaagccgattccaaaaaacaatacttaataattaatatttcattcacgcagagaggtccttgcgggtcgatatcatagacatagacagataggctccgatggagatattgacttctcaccggctttgattgataaaaaagctgtcaaaagcgccgaatccttttccttatcgctgtgccccctgcaggtactcggagtgaaggctacgcttagctgaacgagcagtcctcgagctgttcatgacaatgctctatgccacaccaaaccacgatttggtcctagggagcccgaaaaaggacaaaactgacttgacatttgtatggggtgtttttgaccccccaaaggtgtctcttataaggcgcatcgggcagggaaatcggcgctaaagatagctgatactatactgaaatcaagtcaaaattgtcctaggctaggacaaatcagcaaaattcgaagctacaagagacaagttttcaacggcttatatctcgagaaggacaatggaggacgctaaaccgataagaccaccaagacagctaggacgggggattgtgcccatgtagtcacatgacactatttgtttctaattatacggagcgaggcgcctaacttttggtccttccatttgtcctacggactgggctaagacgacgaggcgatggaagccatatttcaattttgcgaacacgatattcaaggaaagcgaacaaccagcatgtggggcccccacatgctggttgttcgctttcctgacccccacagtgggaaactgacccccacagtgggggtcagtttcgcatcgttgccagaaattccaaagtccggtccaaaccggcttacagaattctgtacttcagtgtagagtttttcagattgggatgctacataaatacataaaagaccaggtgcatcttgtatggaaatcagcaccagtttttggtgatcccgtcgtgactgtttgtcttttctgctgcaattcatgatcgcgatcccgccgtccgtcatcaggccttcccggccccggacctcggtgaggtacatgtacacattggcgctgtcaacttgacagcatcaggcgctttaatctctgcgctgcggcttcaacgtcgtaaatgtacgaaacctctgccagcccttatcgtacgcatgtactgtatgccatgaattccttccttcgttgacgaggagtgcgcaagagcactgcggagtctggtgctccaccaaagccatcccgctgttcgtgaccatttttgccaacacgtaagaaagtctgcgttcatatggccgtgaccgaccatcttgagatcccagctgctcgactgtcccgggtcggggtcactgcaacatgcttgcgccagtctgcattgaagataccagccgagacctcgtgccgaagccaaatcctcgcgccacgctcgaaatcattttccaattcgcgctctcagctccacttgcctcgtccttcagctccagcaacaacaacagcaaccctcatgggcttctcgcaagacttgtccgagctcttgacgtgcctctcgctggtggcggcggtcagctacgtcacggatctgcagctcttcgcgggcgtgtgcgtgggcatccagtggctctcggcgctctacggcatccccaaccagaccgagcggtacttcgacctcacgggctccaccacgtacgcgacggtctcgatgctcgcctactgcgtgagcgagtccgtgtcatggcgcgacacgctgctcacagccttcttgtggctctggtgcgtgcggctcgggtccttcctgtactggcgcatctgcgagtgcggcagcgacaagcgcttcgccgagatcatcgtcaacccgctgtgctacctggcggcctggaacatccagggtctgtgggtcttcttcacgctactgtcggtgctgctcagcgtcacgcacggcagtgacgacccggaagtgaagccgctcgacatcatcggtacctccatgtgggtcatcggctacgttatcgagctgacggccgactaccagaagaccaagttccgccacgacaagcgcaacgacggcaagttcatcacctcgggcctttggggctacagccgccaccccaactacttcggcgagatcctcatgtggatcggcgtcttcctcgtggccgtgcacacgctgccgagcttggcgctgcagtgcgccgccgccgtgagtccgaccttcatgacgctgctcatcatcttccgctcgggcgtcccgctgctcgaggaggccgcggacgagcgctggggcaacctcaaggagtaccagcagtacaaggcgcagacgagcgtgctcgtgcccatgcccaagcgtcagctgcccacgacggagccgccgcgcgccaagttcgcctaattgcccactcaactcgatggacggtctcagatggagagggtaatggtgacaaatgtacatgtagttgcactcacgtagctctcttggtctccttcaaggcctgaaactgcttcgccttgatcctctacatcccacgaggaacaggaccgaactcggtattggtagatcggggctatcgtaggcactgcagtctcctcggatgcttgtcaacgtcaaacgctcatttccaaactctcctaattgggatcaagccccccccccctcctcgttctaccatgggttcctgcgcaacgtcgtcgggacggttgtgagcgtctcgttggcgtcggttgtggcgttctacacggacctgcagttctacgcgctggtgtgctttggcatccagtgggtgtcgtcgctctacgccgtgtccaagcagaccgagcggttcctagacgtcacgggctccttcacgtacgcgctgctggttctactggcatacgtgatgaacagccccgtgtcctggcgcgggtcgctgctgacggcattcgtgtggctctggtgcgtccgcctcggcgccttcctcttcctgcgcatcagcgagtgcggcgaggacaagcgcttcgttgagatccgcgtgaatccgctgcggttcttctcggtctggaacatccagggcctgtgggtgctgctcacggtgctgccggtgctgctggcgctgacccacggagtcaacgacccgcaagtgtcgccccaggacgtggtcgggtccggtctgtgggttgtcggctacttgatggaggtggtggcggactaccagaagacgcagttccgtcgcaaccaggagaacaaggacaagttcatccagagcggcctctggcactacagccgccatccgaactactgcggcgagatcatgatgtgggtcggcgtgttcctggtcacggcgcacacgctgccgagcttcggtttgcagtgctgggccgcggtgagtccgttgttcgtgatgctgttgctgttcacggtgtcggggattccgccactggagaagcaggcggaagagcgctggggcgagaccaaggcctaccaggagtacaaggcgacgaccagcgttctgctgcccatgcccaagtacaatttggatgacgtgaagcgggcgaagatcgcctgaatgctcagcgcgctgttggttgagagataatgcaatacttgaagtttgccaacgttggtggagtgctcacctaagtttgtcggaaaatataacgttccttacggcataagatgtccgccatgaatagtgtgccttctcttcagcgtttgatgaaaatgtcggcgctaactatctggtgcttaaagttgctggacgcctggaagcgattgcagctgagctacaacgggggcaagtactccaatcaacgtgcgttggccctagaggcctgcacaagagactcttccgtactacgcgtgacctccgtatgcttcgcgacgccgctgcccatggttgctctcgtacttgctgtggagttggtgccgctgcaagacccaagcgatggctggagtagaaatttcggcttttggattcgaacagcaattattttacttgttgccatccctgtggtggtgactcatgccacggacttcatcgacggactagaaattgcagtttggcgtcgatttatcgtggcagcttgcacattgatcgtcctcacctgttccatcgcagcgattgcctcctactcatgctttcccattccctttgttttggtaacaacagccccagtggttcaaatatcgttggttatttctttccggctaatagttgggggtcgagcaattaaccacatgctgcgcaccgggaccaaacgattcgattcctgaagtttatggcgactctgttttcgctgttgtttatatacgcggcctatgaggcactgttccacctcgcgaaagggtctcactgccagcttttagttgtgttgctgcttcctgccctcaaactcggcttgaagaatgtggtcatacggtgcacagctcacaaggaagacataacgccagtggtggttatcttcacggtcgactttttcagcgcgatttgcatggccacgtgcatgcagaacacgtcgtccagtactacgattgccacgatcacactcacggatctagtgcagacgactaccatgctgcacacatttcatcgtcgtactgccaaattactctcaaagcttcaactagaccaacattccgaaagcggcggcttgctaccggcactgtcctctttgtgccgagataccaagaatttcacgaaacggactcgcacggacgttcgaatctactcaaatgtcccgcacaaattgtcagcagcagattcgaatctgttggcgagactgggggagttttctggcggaaatgacgttgcccctccacgagctgctgcgttaggatggacgtcatccacggaagctggtacccacgtggaagcacgaaaatgctcgttttggtttaagagctgccgcaaacagattcaccctcgcgtctcagacttgatcgtaccaacacaaggcgataaacggcaactcacagaaggccccagctcgcgccttgtcaccttttcaaaccgacaagcagtagtgagtgagatgcttgagactctattcacgactgagtgtttggttgccacggcctacttggaggccgtcgtcccgttcttctactgcagctacgtcctcgtcatgacccacctcccgaacgcccgctaccatacagacatgactgggatttctcgggataatgtgaactggactatcctccctgttctactgcttgggctgttgcagattgcgtcacttgccgtactggcaatgctggccaagcgcaactgtggatttaattcgtttcaccagctcgcatttgtgctgagcggccaggttgcatttatccaggggaatttgatgttgtggattgtacttatcctgagttttcgcgtggtgcattttggtacgttccttcaaagctaggcgaaagagtatccgaatgctaatgaattggtgtccgtgcaacaggcgtggacttcaccttcaagtttgcttgggtgtgagaggaccttacgagtagatagcactcgattcgactttatcgcctccttaatttgaagcacatactggtgctgggtgctgcgtcttaccctgaggggcgttcttaacagaggtagattggtcaacaatagacgtgtgcctataaaagctcatccactctgactgtcattttccattttggtaagcttaacttggcgttctcatgctggcgctccccgggaggaaggtgtttaatgcgtggaaacggctccaagtcagctactgcggcggcaagtactcgatccagcgagctctcgctctggaagcccacagtaaaaacacctcacccttgcacgtcctcctcatttgctttgggacgctactacccatggtcgctctcgtgctcgttcaagaactgattccgctccaagacccgagtggtggctggcgtgtcaactacggcttctggatacgcgctacgctcctgctcgccactggggtacgcactgtgactgtccaagccacctacttcatcgacggcgtgcaaatctccacaagacgccagctcttgttggcagtgtgcgtctcgatagtcatgacagctttgtccgtgaccatcgcctcgaacgtgatcttccccatcccattcttcatcatatcaactgcacccatagggtgcgtagtgcacctcgtactgttccgcgtgatcgtaggcagccgagtcatgcgcaacatggtaacgcaccgcagtcagctggccaactactcgaacttcgtcaactctcaggccttgatggcgctggtattccctgcctacgaggcgttgtttcgcgctacagaaggctcaaggtaccagcttctggtgataccgctcttaccggtaataaaggttggtataaaaaatatcgtgctgcggtgcacctcgcaactcgaagacatgatgccggaggctgtcatcttcacggtcgacctcttctacgggatctacatggcaacctgcatgcagagctccgagtcgattgcgacagttgtcgtcataactctcaccgaccaggtgcaatcgctaaccatgctctacggtttgcatcgaaggactacaaccattcttcagcgattgtgcgataccatcggagctgagccggagaacaccaatctgctgagtgggctctgctcgctgtgccaagacccagagaagtttgaaaagcaaacgcagcgaggggttcggaagcgctcgtgtctccctcaagttttgtctattgaagacatggggctgcttgagatgctcgacaagattcctagcaagtccgcgagtatcaatgtgaattacctcgcctcggctcaaacatcaaccagtttttcgaagtgcaaaaagctgcggtgttgtagctcacgaaggtccagaagctcgatccatccgaccactgctgctttggcgccacttgattctgagaaagacgttgaaagtcgaatgccggacaatacaggacccagtctcgaaatatccgcagcgcatggctccattttgcaggaatcgctagaggcaattttcacaacggagtgtctcgtcatcgctgcgtacttggagtttgtgatccccttgctttattgctgctacatcttggccatggtgcgactgccaagcgcccgctatcactccgagatggctggcattaccctagaaaatgtgctcggaaccgtgttcccattatttatctacgggctgatccaagcgctgtccttcgtcgtcctggtagttatgatcaagcgcaactgtgggattcaagccttgcaccagcttgcattcgtgttggagacgcagatgcctctgattcaagacaaactcatgttctggccgaccatgaccttctgctttcgtgtggcacatttcggtacggttgggaggcttttgatgctacctaggactgtcttaatgcgaattgttctgtatcgatgttattcaggtgtggacttcacgttcaagttcgttcagcgttgatacgccgctagggtctaaagcttcatgttctaagcagcctggaagacgcctcgagccacaccctgctcttcctcctgctgactagcgaacgagttgaagatctgctccagcgtcgtctgcgagacgctgtactcgcggatgtgcatggtggatttaatgtcctcgatcaatgcaaacatcctggagagcttcacgtcactggggccgccgcgcactttgaaccgacagaagtcgctctgcctttcgagtacgacaaccccaccggctccaaacgcttgctgaagatactccttgagctcgttgaatcgcgtctcctccacgcaccacgcgcagaatgcctcggcgcgaatgaatccgtctcgttccagcgctgcagcaagactgtaacccgtcgggtgtgcggcagtgatgagtctagcaagatcgacgttgccaaacgcacgacacttgtcctccagatctgctggtgtgacgtaggcgttgccgtcactgaagactctctccactagacgatcaagttcgtctgcagccacagactcgaacttggtgtcgaatacgaggccatcaccgaaccgagacttgagatgctgcacgctgcctaagcagcgaagacgaccgccgaccatgatccccactcgagagcacaaggcttcagcctcctccatgctgtgcgttgtcaagacgatcgtggattccttgcctcgcgttgagatatcggcgatcacatcccacatgaaccgccgggaaaccgggtccatgccggtggagggctcgtccaggaagatgatcggcggactgccgatcaacgcgatagcgaccgacagcttgcgcttgttgccgccgctcagacttcccgccagtttgtgctcaaagtctgcgaggttcagctgctgaattttctccgtcacaactgcctccatgtcggctcgagccacgcccttgatcgccgcaaagagctcgagatgctcgcgcaccgtcatccgctcaaacagcgcgtcgaactgcgggcagtagccgatttgtcggcgcacttcgatctgctgcgtcaagatgtcgaagccgttgagtgttgccgtcccgcagctcggagcgacgtcgcccgtcagcattttcatcgtcgtcgtcttgccggcgccgttgatgcccaagaagccaaaacactcgcctctcttcaagccaaacgacaggtctctcacggccaccttgccaccagggtagaccttcctcggtccagcaatcttcactgcatcttcattcgcagccccattagcgactcgctgagcttccttcgccacatcctcgtcgatatccaacttcccatcgtcaacgccctgagcgcttgcgttcttgcgttggagtccggggattttcacgccgtagtcgatggcaagcaccaccgccgagaagaggaacgtcgtgagcaccaggtaaatcatctcggcgcccatgaggtccatgctaaacgggctcttcttctccgtcgtgccgtcctgcagcgtgtcgagctcgttcaacaccagcgacagcagtccgttgcctagatcgaagagcggcgacagtctccagatgaacttgagcactgaattcaccgactcggtcgactccatcacgtcgaggatgtagctcacgatcatgagcacgacgcccagcagaaagttgatcttcatggtgaacgtctgtgacgccgcgtgctccttgaagaggaacgacaggcagtaggtgaacgggcagatcgcgaagccgaagaggatgaagagaaggatcaccgccggaaacgtctcggaggtgcagctcgagcactcggagttgccggttagcgccgagatatcgaacgctttgatgaggacgatggccgcgacgcagggcacggcgaacatcatgaggtcccagaggtagttggcgagccaaaacgcagtgagcgagacgcccgagaccagttgctggtgtttggagttgtggctcgcctccttctccctcaccaggtacacgacgaccggcagcgggaagtacgagaacgagatgcagacaaagacgcacgcgctgaaggccaaaacggagccgaagagcgccttggccgccgctgtgagcggtagtggatggttgttcaccgtaagatccaccgtcgaatcgctcgagttggcagcgaagaaccgatagatcgcctggtccatcaacgccttgaatatgacgggcgcgtgcgtggcggtagtgttggtgaacaggttgtagctgaagatctgctcgtcgctgtctccatagaccatgaacgcgctgtactgatcgtcaaccgcttcggtgttgttggctccgtagcctctgttgtacagcgtttggcccattcgaagcccgaagccggtagcgtccgtcgcgttgatctccgggtccgagtaggtgacgttaaagacggtcggagagtttgagtcgtaagccggagactcaatcgcgagctcctgagcttctgctccagagaaatacgacgccatgacatcgctgcaccattcacctccagcctggcagaagtacggggtcggtgtggaattgtcggagctgtacgcgttcgtgttcagcgccagattcgggtcatcggacgtcgtgctgctgctcttcaagataatcagacctgccagaagcagcagaatcgggtagaacgtcgtgtagatgatcatcttcttctcgcgcttggcgtggtggaacctcttgagaaggagagcgcgcaagtgcgagaagaacagaccggatgtctgcaacgccgctacaggagcagcctcgctctccgtcgggcgcgtgcgatggcccaaagtgtgttggtggttctcatcgtcagcctccgccactttgatgaaaacctcctccagcgtcgtggctgaaatgccgtacaagagcaagccgagcttggacagattgttgtccatctcggtgaacatgaccgagaacatcggcgagctcttttgaggcagctggaacgcgatctcgctgccgacgttgcttagcagctcagcagaggggacgtacgacctgatgagcgtggtgacggccttgtcgtcgcacctggcgtcgtccttgacgatagtgaggttgtagcctgctccgtaccggttcttgaggaagagcgacgacccgcagcagcgcaattcgccttctgccatgatggcatggcgatgcggtctcccaggatatcggcctcatccatgaagtgggtcgtcaccaccatcacacggccactgcggttgttgaggaggatctcccacgtgctacgacggctgtaggggtccatacccgaggtcggttcgtccagaaacaccagggagctgtcacccaggagagaaatagcgaccgaaagcttccgcttcatgccgccggataattccttggacaggacgtggcgcttctccgtaagacccacctgacggatctgtgagtccacgagtccctgcagctcctcattcctgtatcctttcacccgtccgaacactagaagatgctcttcaaccgtcaagtcctcgaacagaacgtcgtgctggaagcaaatacccagcgattcgcgaatctcctccatgtcttgattcagcgagagaccacggtacttcgcgtcaccgctcgatggcgccgtcatgcctgtgagcatcgagatcagcgtcgactttccagctccattgtggccgagcaaacacgtgatctggtccttgtacgtgatcaagtctagccccttcagtgccaccttttgaccgcctggaacctcaaacaccttccccagacgttgaatggacagcacttcaccccgccgctcttgctcacggagctcggcactcacgcgctcaatgttcgggttcacatccagcgccacgctgtcgagtaaagagtccgtaggcgtctcagtcccattcgaagtcgcggatttcttgcggcctcgccaatacgacggggagaaagggaaataccacttgagcgacgtgccgtactgcttagggatgatcctctcgaagtacagacccagcagcgtgtacagcacgcagtccacgaggaacatctgcagcgctgtagcgagtcggaagttaatgttgagcgtgtccagatttccgaaatttgcgccgataccggacgattcaaagtccgcgatggtcgacagaccaaacgaaagcgcaactggtggcaagatgcaggcgtgagagatgtcctgctccggcgagtcgtccgtgaacgcttgggccacgaagtacatgagaaagaaggcgatcatccccacgaaggacccggtgcgggcgttgctgaagagtgtgctgatgaagaacccgaaacagagaacgctcattccgaacaggaagaagaagaggaagatgacgaccaccgagctgttggcgaatagcccgacgagacccatgagagcttggagcacggcgccggcgaagatgatgagagtgtacgtgatgtaccaagtggcgacaatcgcgcgctccttgacgcccaagatcttcatgtactcgcgcagacgcagctccttctcctggatgaagaccacaaggatcctcgacgtcaggtacaggtacgagaggatgaagatgatggccaagacccccgagacgtcgtcgtagaagggagagctcgtgtacgcttcaatggggaacggcgacaccgaagacccgagatatggctgcggggcctggcgcagcggcgtcagcagcgcctccttcgtgctagtcgacaacagcgacagcatagaagagaacgacgtattggaggcacccgacgctgtcgcgtactcgctcagagctgatttcagcatggcatcggcctccaacgacttcagtagccgcttgtctagtgcgtccgacgcggatgcagtggcttgtgctcgctgacactgacccgttgttgtctgcgtcgttgcatcccattcgggcatgcaagtcacgaagcgcgtgacgagcgtctgcaacgtcatgaagcccgtgagcgtgtagcgcgtgtagtagtcggtcttgatggacttctgcgaaggatagagcgctgacgcatctccgtttgtcggcgggatgagcccaagcacgccgttgttggtctccgttgagttgagacgcagtgtgtactcaatggacgagaacgagccgatgtcgctgccattcgggtacttgtcgaacacaattcccccgtagatgcgcgggctgtcgagactggagccgtagctcttccccttcacgtactcttccagcgcgtcttccgagccaaagaaggccacactttcccgaagactcgcgaactgcagcgacgtcgaaccgttcaccagattcacgcgaaggtaccagagctccattgtctgcatgaaatactcgcgcgtgaaggcgttgtcgggcaccactgcgattttgtaaggcacaacgcacccgtcacattccgatggcacgctggacgctgacgacgagttggtgtcgacgtatccgttcagcgcaacgccgacggtgcaggccgtgtagtcgctggaggacagttcgtggagtctcactccgtcggtcacggattggcgggccatgtaccaaagcagacccgtgacggaagtctcgtattgcgtccacttgggcagctccgaggggatggctgagagtgagaacccagtggggtcgtacaggttgtcggaagttccggcggagctatcgctccaaccagcagggacgtcgacgtcgtctacgaggtgcttgagcgcgcccaatagaaggacgaagagacacggcagagtgatctcgaagacggtggcgcgcaggtggcggcgcttgagtgtgtagttcttccagagcagcgtgcgcatgtgcgccaccatcgtgcggttcgctgccaatgaggcggaatcgacctccttcttcatggatgtctgacggctggaggctggattggtgtggttttgtggtggcttgttgtcgcggcggtggaatgaataatgcacgggtcgacgtcgagtatcggaacacggagggaacactgtaacatgagtacaactggtatcgcttcagggaagccttaccgcggcaacatgctatgaaggcacacgcattggattttctcctaatggtctccaggaaaatatccagactgcaacacactctcgggagtgactcggccaactacggatgtagctatcgaatcgtcggctatgtcagccgtcaaacgaagtcaaaatctactttgcaaagtcaccgcgatgtgcacacttttctgcttggtctcgagcaccatatctcagtacatttagtacatttccggagtcagcaccactgcagcgtaatgagttgaattatgattgctccctgatctaatcgtgcttgattatgtggtaagtacaccgctaccgcattcgttgaaaagctggacccacatcgccaaaggggtccagcttatcgatgaagggctgtgggctcctagtgtccctgtgggtaaggcccacgaagatcaagcgttccactgagggttcgagtctcgcccggagcgattccgatacaaaagccacgtaagtctatttccgacccccgactacctccatcactacatcccctggaaccccctaagtcacccaccctaatggatctcccgattaacctctgcaaccgcatctcctcaaaccgccgcctcaccacgacctcaggaagggaaatcgatcaactaggaatagtttaggggaactcacttagacgtcaaagtgccagcttccagcagggtccgaaataagtgcctaaatatacgccaccaagtcaagttcctggggccctctctctctcgatgaagggctgaacagtcgcttttaatgtcattggctgcaaatcaggaagggtcagtcgtacctcgactgtgattggacaaaatataacaaatgggtccagctctcccttcaaatctggcccatcacggatagcgccaaatagtgtacccttcccgaattgaatacctcctctcaaatctgatagaatgtgctcagtatacaaagctattgtacctacgccaatttgtatacctcaaccgaaccgtatagaacgttgagtacttataattttcttgaaactgcaaatttatgtgaaatttagcatgttaacatctgattggctaagagatgtcttgaaattgaaatcaccttatattttacctgtaagtattactttgtcaaatacggcaagttgttttatctttttgaagaccacagtttaaccccctcagatcgttcctaggacaaacgaaagggccaaaactttggcgccctgctgtcataaaactacacatgaatatgaagttttcttagcatgggcagaaaaccctttccttaatctctctgttgacggatcagcttcacttaattgattgtccttgtagacataaaggcaatctaaaaattgtctctaataacatatcactttgacgaatttatcccagctgcttggacaaaattgaggatttgactggatctgagtatggacactgctatttttagctctgatacaaatgcgtgagccataaggcgggcatacaaatgtcaagtctttttttgtcctaccgggctggaggtaggacaaatcggcttatgtacgccacaccaaaaaccaatttggtcctttttcctaggacaaatttagactggggttaaaaactgacacttgtcttcagtgctgtttgcaatttttggaactttacgcaaaattaccgcaaggcacccaaagcaaaatagttttggttgttggtctaagttctgcttacatctaacggcatgacaggcgttgtgaaccaactctgcgcaacctatggatgtctccatggtttgaagactggtacatacattgccagggtgtcatcaaagagggtttgcagaacgtagctagctctacagtatacaaaatatccagacttgtatgcgtcggagctactttggtagtataccctcctatttgtatatttttctaaatttgacaagtgttcaattcaatagtatgcggtatacaaattggcgtttttcgttatataggaaaaccgagacgggggtccagcttttcgatgaaaaatggggggtccagcttttcaacgaatgcggtagtcgataaaatgattcacggcgttggtgacattgatcccgacttgagtcccacagccagcatcgtgttgaactacggatggagtgcacacttcgaaagttcaccacttgtataacactctaccaggatatctcggtcttttgccgaatggcggctacctcgattacatgtatgtagtccattttgccgtctcttgtgaacccaacaaacaaaatgtagcgtgcaggacacatcgttggcagtgtaagctgccagttagtagctccgcaacattggattctaccctcactgcaacctcccccgtgatggcatgctgaggtatgacgacgatctcgggggcgtgaaggcgcattgtatgacgaggccgccgtctagcttcagaagcttcagatgacgatgactccggatcactgcggcggcaagtaccggtactacatagttattagaagcagtataagcccgagattccctaggacgcagcaacatttttgacattcacgctagctccaagaaagagctttcaaattgctaccgtagtcaagtctgggctattgagctttctaaagctacatgtattctaaagctcaatagtctacacttgactaaggtagcagtttggacgtcctggttcgggctacgaatagatttcatgagcagcattgttctcgggcgctatctgttgactgtccacaccaacaactcgaagaacgaatggtctccttgcttgcttcatacgcacttcacctattccgcggctggaagcggcttcaggtcagctactacgtggggaagtactcgatccaccgcgcacttgcgctggagacctacacggttaacgcctcgctattccgcgtgtttgttgtgtgcctaaaaagtatcatgcccatggtagccctggtgttcgtccaagaaatgatccccctgcaagacccaaaagaggggtggcacaagaattacgggttctggattcgcgcgagcatagtgacgttcgcagtaagtcggtccataattgtccaagcgacctactttgtcgatggcgtcgtgatcccgccgtgtcggcaggtgtcactgctgctttgcgcttcgattggcattacgggttgctccatgggcctcacctctctcccaacatttcctgtcccgttctatatggtggtcatttctcccgtgagctccgtgatacagttcatctcatttcgcattgtggtggggacgcgagttctacggcaaatactgcagcatcgagatcaattgctacggttcatgaattttgcgtcagtccagaccacgatggtgttcgtgtatccagcctacgaggctttgtttcgtgctgcgcaaggttctcggtatcaggttccggtcatttttattctgccgctgatgaaggtcggtttgaagaataccatgctgcgctttacgacgcatatggaagatatgaccccagaagccgtgatgttcactgtagacttcttcaacgctctgtacttggctacgtgcatgcaaagcgcgacgtcaattactgcataacggccaccgacctcattcagactgctgtcgtgctatacggcctcaacaatcgtactgcaacaatactacccagacttggtgaggcactctatttatcgtcgccgtgcgacaacttgctcagtggagttaccttactgtgccgcgatcttgagaagtttgagcagcaagtgcgctcagatattcgcgttcgctcttgcctcgctcacaatatgtcggtcatgaacgaagatctgatctccaagctagacaaagtcccgctaatggttaaggccggaccaccttttccagctacagaaggaagatcccactgcctcagctgccgaaagcacaagagcaattccattctgccaattcaccccggcatggatgttgtccctcacgctgcttgggcggaaaagagtcaagatgtttgtggcagctcattatcgctctcgaaaagcctgccgaatcactccacaatactgcgggaagctctcgagatgctttttacgacagagtgcctaatccttaccgcgttcttggaggcagtcatccccttcttctattgcagctatattctcgtcatggttcaccttcagagtgcgcgctatcacgcggagatggttggaattaatcgtgagaacgtgggctcaaatgttcttccggtgtttttgtttgggctgctgcaagttacgtctttcatggcgttgtcacggatgattaaacgcaattgccgaattggagcaccgtaccaattggcgtttgtgttggagacacaaatgcccctagtgacaagcaagttaatgttctgggctgttgttaccctgtgctttcgcgtcgagcatttcggtacgcttttgaggtttatctcattatgacctgttgacgctctgctcacttcttattgcatctacgcaggcgtcgattttacctttaagttcaagtggaactagtcagactagcccctgacatgcaaaaaaaaactcacttcttcattttttttcacttaccatcgtcttcaatcgctcggaagtggtgcatatcgcatccgttatgctgctgatggcgttgatcaagcgaaactgcggtatacgagatctccagcagctcgcgtttgtgctcgagacgctgagatcgctcatcacgttctggatcgtgatgacagtgtgctttcgcgtgacacacttcggtattgaattcttcagcgtagggacaccggccgactcgttctacttcctcgccagaggcagcgtcaaagtcacggagggcagggtataatacgttcatcctattgctgcaccggtagtattcgttttcctgactgatgaatagtttggttttgcacgcaagtgtcggctttagtttccgatcgtgagcacttcaacttgcttccaactcaacatttcccgttattccgccctttctattgtaaaattcacattagaaaatcactggccacggtctcggataggcatggccagcttcagacgcaagacaccagccgcatcttcgctgcgcagcggcaccaagccgttcctcaatgggcaaacgctcgtgtcgtcgggtttgagcgagctggacgcggctttgggtggcgggttgctggtcaacactctgaatgtggtggagacgcctgctgagtcatcggacggggcgtcgacgagtctcgacgtgggcgctggggcctccgaagcgctggcgattgacctactgcgatacttcgcggctgagggcgtcgcggacggcaagcagcgcgttgcaattgtggcccccgatgcaagggactttatcgctgcgcaactgcctctggagttgagtctcgcccaacgacaggtcaagcagcagctcgcagacacagagaaggagaccgaggacgccccgctgactatagcgtggcagtacggcaagtacggacagcaacagaagcagactcagaagcagcggttctgccacagctacgacctgtccaaggcgatgcaccgcgagatgctggccgccaatgagccagtcgctattgacccgttggcctggatgacggagagtgtcagcgacgtgtacgaacgtctgtacctcgcaattgaagagttggtacagcagcagaaggaaggtggaggcggccaagtgattcgagtggggatgttggggctggggtcatcattgctgggagctccggacgctgcgcacatggcagcgctgttctccttcttcaggcggctgcgagctctgctcagccagtcgaagggcgctgtgtgcctcgcgcttctcgggagcgacgcactgagcaccttcccgactgcgtttgtcaacgagcttcgacacctgagcgacatggtgctgacactgaattccttcgctggtacgcgcgacctgctgcctgaggagctgctcgagttccagggctctctgactctgcgcaaattgccgcgcgtgcacgcgttggcctgccacgcaccgagcaacacgcgcttcggggtgaaacgcgagcggcgcaagctcaagatcgagaagttccacctgccaccggaaggatcccgcagtagcagcaacaactccagcagctgcggaagcaacacaacgaacagcggacacgacccgctggccttttagacaagagaaatgttagtgcgtttctggtagttagttatttcctttttggccttgaacctgtgctgctccaagtcaatgaggtcatcatcatcgtcttcatcctcgagcaagaagacacgtcttcttgctcgtcatctttctcctgctctccctctgacttggcatacttgtgcttggacttggccctgcgactggccttcttgcgccgcagccgctcgatcttctcgctgcgcttgctcagcgccccgttcgcgtggtcgtccagcttctgcagcagcagcttccgcgcggcgcggcggttgccgtccagcgagcgcgtcttctggcagcgcacctgcagccctgtggtcacgtgcgtcagcagcacgcagttgcgcaccttgttgatcttctggccgcccttgcccgagcctttcacgaacgactcgtccaggtcggcctcgcgcagctccacctcggtgcgctgctgcttggacttggcagggcagtcgctgggcgagaagagggtggggaagagcagcgtattggggacttggagaggcgcccagcgacgcgccacgctgctggagctggctgcggggcgcagcgtcgacagccagagcatggcgtgcttctattgcaattaaatgtaagaggagctctttcaaggacaagtaccccgtcgggaccaacgcgtgcaaggctgactgcgccatccgaaacccgcatgcaaaatgcagcccggttaaaccattcagctttcagcccaagctcacacgaacaacttcaacaggtcccgaccgccaaaggcgtcacgagttgcccggctggaagggcatttgaggcccctaagcagcaggacaaggcgtactggcagttcgtcgtatgtgtggtagacgacaagtacaaagatattccaaggcaagacctcacccgcgcccacgccaaaagcttttattgctttggatgcaaggaggagcttccatcaagaagggaaagagtttggttggcccccacatgcggaaatgccacatcgaggccttacgggctttcaaagaaaatgagcggcatgaagcagccctgaaagaatcgaaccaactggtgaacttgtttgaacgagaagatgaatcggaacagagcttcttcgagggcattttgtcggaatgggtgggtacggatttgcgacctacaagtatcatcggcgacagaggattcgcgaaggcgataaggtttgcaaacagcgcaaccactgttcttgagatcccgtcgagacaaacggtcgcgctccgtgtccacgagaatgcttcagagcgccgtttgtcactgcgagtgatgctggtgagcgacgacgaatgtgacttctattcggcctcgtcggatatttggacttcgataaagtgtgaaagctttataagcttaacggttcactaccttgacagcctgttcaacatgaagtcgtggacacttgaagttacctctattcctggaaaacacgatggagaagccattgcagatgtactgttacgttgctttgcgtggtggcgtctggacaccaagaagtgtgttcgatttctacgagatgctgcgtcaaaaatgaaacgtggatgcaccctccttgggctcaatcatcgatcatgcgcagcgcactcacttcacctcgttgtagccgcggcgcttctgcaaaaaggagatgaacgaaagaaggcgatagcagttactgatggagccagcaccgtggcgaagttggcagtactctcggcaacgtcgtctgtgtgcgcagtgagcagtatgtagaaaccgaaacccagtggatagatgagcagctggatgccttggaaaatagcccggactgggacgacgacggtgaagacgaagagtttattagtgatgctgatattgatgcgctttgtggggaagttgccagttttgttgcagaagccgagaaatcggcggctatggaaattagctcggctgatatggagctggttcgcaaaacggttcgaatgttccgaaagctggcggactacttccatcgctcacaaaaggctcgtaatcgactagatgagctgcagtctactcgaaaagagcccctaaaagtgttgttcgattgcccgacgagatggaacagcacaatggttatgctccagcgctttttggatttgcagcctgtggtgaaagatttttccctgtacattaagtcggaagaaggcgagaaggagtttaacgatcgatctacaaaaaagttgaagcttccaagtaccaagcagtggttcatgattcagtgcctggtcgagctgttggccccgttcagcgttgccaccactatgctcgatggagagacctatcctacgctgatatctcttcatcttttcatctcttcactcaaacgatcgctggacaaccaacaaatatttgatgttctctatacaagtgtcgagaaggaggcatacgcaatggaagtgctatccatcatgcaatccgtccgccgaagcttttcagccttgttgaagcagcggtttgacaaggaggcagaccccgaccttttgtggatattgcttgaccccaacatgacgaattcggcgattttcactgcggatgaatatgagaaggcgcgggagcagtttgccgatgagatgttcgtgctaaagaagaagtctgctttggttcacaacgacgcagctcgttctcaaagccctgaaaagcgaatgactgatgcttcagaccgcgctcgacagagcttcctaaagatgttgtacggatcgagaacgtcaaatcggcagctgcgatggacgacaagttaaagactgactgcgagtgggagctaaggagctacttgaagcagtcgagcgaggcggaggtcaaagatcccgacatcccccatcggctttgtcgtggtggaagcagaaccattcaaaatttccgactattgctgttcttgctcgcaagtggcttggatgcatcgctacatcggtgccctcagagcgcgcgttttccactgtaggtaacacagttacaaaacgacgttgttcgctgaaggctagcacagttcgggatatggtgtttatggctcaaaatggagcagcatgatatgtatctagttcgtgatgacaacactgtaactaacatgtataatgtttgtatgcgtcttcataacgaaacttcttcacgtatgtaactcatttcaatggtgcttctgcgatagtattgaatgaagatggtagagcgcttctgcaattttgggccactccgtcggatccagagacacacaaaccgtgaacaagtccggcatcgattgaactaacctgatgaaaactaaccagcgccaccatctaaatgatgaccacctcagagactttgtggtctgagtcaatatccccgcagccttttgcgtgtgaatacgaaatgacatgctgatccaacacgggcagtacgacactgaccaagaacatgtcgacgtacacacaccacctccagcgccatccaccgcgacaagccaacgccggccgtcatctcgtcgtcttctcgcttagctgtgagattggtctctaggctggaggcgagctggacgttatcgacttcacgtctcgatgcagtacttaagtctcaagcgagtggaggtacgtgagcacgtacgccgcgttccgagcgatcgtcaacatgctgagatcgaagcctgtggtgttttcacacacactcagcaacgcacgtaagtcgccgccctccataatctccgagacggtgcacaagtccgtcagtgagtctcaagccatgcccgcgaacgggacactgcgcgcgtgctcgagcgtcgccatgagcttcacgccggccgggagtgcgtccacgtgcttgacgctcttgcgcactttcagcagcagcatctagaccgaaacgagccgatggttgaacaggcgtctctggagtcgtcgatggacttggcttccgattccatgagggagaatgggacctgtgaagccgttctcttcctcccgctcagtgtcgcgagactggttagtctggccgactgtcggtcattgccgcacgatgtacgggccgactcagaggaggggtcagctgagttgacgatcaacttggccacgttggcagctaggtatggcgtgtctgtcaccacgaagttgtagccttcctgcaagtcacgggaatacaacctagaggtgatgtgagttcgctgacaacgcatcaggccacaagacaagcggcacagcacacgatcaagagagttctgctatctgagactacctgtgtattatcggcgcgtaggcctaagggtagagaatccgatccctgagaaggtggcaatctagcgttcctgagcatgtagtcaactacggtagtcgagctaacatgccacaaaatagaatgcgagccgccatatgcaatgaagcagcccccacaagtggcatctcactatttcgaaatagtgaccaagcgggtggtgtcaagggggcgttgatcaggcgtccgttggcgacttttgacgtctgggtgttaaccttcgataacaccggacgtcgacagctctggtaagataggcactgcaacaggatctccgctcaggttttggcggacctttccttggagcgtgacactgtccctctgtggtgacgcgaaatatctagccaatcggagagtactggacgggctatgcctgtttaggcgaaacaacatccggtttaagggagatgctttattgaggtaaaatattttgtttgaggttttcaatatcttaattgaggaattgtggccttgtaggacacatactctgctcaattgtcggtgggcaggcattctgcaggtagattctgcaccgacaatctcgagtcgagattcttgactgagctgatacatctgcatgctgacatactacgtagcagtagtctaggcaggtagtgttgcaagaactctcccaccaaagatcattgtcgcgagcgtacagtatactgtaatgagttgccttcagggtatgtcgatacccccccacgttgctatcggagtcaatatattagcatgctgcaaaaaacacaaacaaaaacatgttttacttgcaaggatccacatacattataaacttcatttcaacgtagtttagcgatcaagtatgaatgtggactaggacattgcattattttataattaaaaaagccagatactcgcatcaagttaaatgagtgcctcaattaactcgaaactttcattgatggtccaatgatgacattatgcttatttaaaggattctatatagaggtgatatgatcaggattctacaaaatagagggtagtaagacggttttgtaccgttccgtaagtctattatgttctaaatataatcgatattctaatagaaatgattaatgctttttttgctttttcgatcactcaccgcctgaaggaaaaaccgatagagcgtgccatttccacaacttctccggacagagcgaagcaccctgtgcccacctccatgcccacgctagcgatggcgctgcacgaagagaagccgccggggccgcctccggagcttctccccactgccgctgccgcctccgcgccaccccccaagaacacgcgcggcgccaagggcaagcggcctgccaaaaccaagccctccgctgcggccgctcaggctgcagcgccagcgaacgagccgcccaaggagaagccccggcgaggccgacgccgcatactggaggacgaggagcagcgcaaggcacggcgtaaggcgcagtgcaagctgaaccagcggcgttaccgcgctcgccagcgcgggctcatcagcacgctgtcgctggagacggaggggctgggcgaccacctgcaggacctgcgcgactaccgagacttcctacgcggttactttgtgcaggcgcgaacactcgacgtctgggacgacccgcggcctgtgctggtggccaaccacttcctccgcgcgttccgggcaggcttcgcactgcactcgaccgagtccagcacgctgcaagagagcttcgtgcgccttgtatgcgcgccggacatcattgcacagggcgccaccagcgacggcgtgggggcgctgctgctgcagctcaagcggtacacgtcgtaccatggcacgttcgagatacggccgggcaccgtgaagctggtccacgcgccaacgcaggagatggacacacaagcccaagaggagaagctcagctgtgtcgtggaggcgcgcggctccgtgagcctgaggatttcgcgggacactctcatgctcgtgtacccgcacgtactgcggcatcgcgacgacttggcgcagcgcatcgtggggcagacgatcgagccggagttcacggtggtctttcacttcgacgcgcacgcgaaggtgacgaaactggatcagcacgtcgattttgcaggtgctttcctccagctactgggaaacgcagaagatgtggccacgttgctggagggcgcgttgatctcacctttctccgagctcggtctggatccgcagggcaccacgacagagtcggcgctcacgcgaggtggcagcaaacagctcagtctcaagtttattcttctgtagacagcgaggtaccggcggcatcgcagagggaccattccatatcccgcagatattatcagagataacggtgttcgtcgtaagagcagagcgaggtcgacgtagtcgttgctgtgagtcacagcctgtgaccgaaacagacccaagcaaacaaatgatacagtatttagtcgattcccgtatgtggaaaccaagatgtaaagactggcattgcatttacgctgctgactgcgtcttcacctccgggactgcggcgggcagtgccagtggagagaagcttgacggcggggtgcgcttactccttcttgtagtagttggccggtacgaaaggcatcttggtgatgacggccttctgcgttttcttgcgggccttgacgtgcagctccgtgccgagcttgccgaggctcttgtccacgtaggccatgccgatggccttcttgagcgacggactgaaggtgccgctggtcacgtggcccacgacgttatcgtcggcgtcgtagagctcggcgccctcgcgcgcggccgctccctccaccacgaagcccacacgcttcttggtggccgtcttgttcttgagctggtccatgatgatggcgtggccggggaagccgccctcctcgcggcggcgcttgccgatggtccaggccagcgtcgcctcgatgggcgtgatctcgggcgtgatgtcgtggccgtgcaggcacagacccgcctcaaggcgcaggctgtcgcgggctccgagacccgcctccagcacgcgctcgtcctgaatgagcgcgcgcgcgaaggtctccgagtccttgctgagcaccgagatctcgaagccgtcctcgcccgtgtagccgcagcgcgtgagaatcacgtccagcgtctggccgctcttgagcgtgagcggcgtgaacacgccgtgcatgaactcgaggtccttgaggttcatgttgggcttgagcaactcgacgacgtccgcggcgccggggccctgcagcgcgacgagcgcgcggtccgggatgcgctcgaggcgcgcgtcgccctggaagttctcgagcagctgctgcatgtgcgccacgtcggcgtcctggttgccggcgttcaccaccacgtacaggtggtcgtcgtagcggctgatgacgcagtcgtcgaggatgccgccctggtcgttggtgatgaggctgagcttggcctcgccgcttcccagcgcctccaggtcgcccaccacgacactctccaggaagcgcaggcggtcggcgcccgtgatgcgcagctggcccatgtgcgagacgtcgaagagcgacgcgcagccctgctcgcgcgtgtgcaggtgcgactgcagcacgccggccttgtactgcacgggcatggcgtagcccgcgaacggcaccatcttgccgcccagcgccacgtgcaggtcgtacagcggcgtcttcttgagcggcgcggaggacgcggacgacgagaagccgcggcgcagcgcgcggaaggcggaggacgagcagcgcgccatgatcagctgaaggcgacggaaggcgagtgaaggagtgaacggagctcttggctttggattggcggcgtcagctatagtgtacgacaatgactgcaccaactagagaaggagcagcgtatatgaatggagcaatcgtttcgatcggttgaagcggagtccaatcaaacggtttgggtgccgcttgtgtaaaccaatcagaggtcagtgatgtgcggcacgtcaaatggagggagcaataaccggttcatggctacattttttgggcggtccacttcaacttgcccttcaatctggtctacttgaggctcttggccttgcggatgatctcgtccacgagcacccagttggccttctccatgcgcgcgacgatgtcgatgatggaacggaagcgcgactcgccggtctgcagcacggtgctcacgatgacccactcgcggcggttctgctcgcggttctccgggtagtcggccagcagccgctcgtacgtctcccactcgagcacgtagagcagcgagacgccgagcgacgagcacgtggccgagcgcgggatgccgtagagcagcgacagctctccgaagaagtcgccctcgtgcttgaccagctcgaagccaggaccctgcaccagcaccttgcccttggcgatgaagtacatgctgcggtccacgtcgcccttgcgcacgacggcctcggcgggcgaacagatgatgtgcttcagacacgtcagcagcgagcgcaggaagctctcgtcgcagctcttgaggatcgacacgccgttggcgaagtcccgcagcgtgtactggataatgtcctcgaccagcaacgtcgagagcccgcggatgccttccaagtcgtcgtggccgtgatacttaagccacgtgttggtgtagtagagccgcaggcgctggcgcacgtcgcgcgggacgtcgttgttccggagaaagtggtagagctcgatcaggttctgctcgaacagcatcttgtgcttgtagttggactcgatgagctcgccctgggcgcccacgagcacgccgaagatcaagatgcagaccacgatgaaggcgatctcgactacagtctccaccacgttcatgctgactacgtcgccgtagaagacggtcgtgatcgacccgatggcgaagtggagtgagcggaggtagcgccgcgacgtggggatctcactcaaagcaccgaagcgatcgactggcagcattttgtacgtggacagccacgagtcgccgtagatctcgtaggcgtgcaagcccaagcggaaccaaaggcacgcgatccagtggccagacagcaggtagacgcacacggtgcggatgaagtgcagtcgactctcgctgaaggacaagttcaggtcactgcccaggaactgcgtcaagcgctcgctcacttcaatcgcctccaagattcgcggcagcttgttgagctgcaggagcgacaggtagaaccagcgatactcgaccatcgaggacgtcgacagcggcggcaagtacagcagcaagtcgagagggatggaggtcgccacttccagccagaaatgaccctttcgtcgccaccaacgccgagacttcttcgccttatttttcagtgaagcaacatcagcattcagtgagcgcatactacctgcagatgagagggacggaggcgtgactgcggctggtttcgctgctgcagggatgtcagtgctgcccccggcactgagacgcagcacacgccgaaacgctgaatgcttgatagcgaggtctgcgagacagagcacatcgatgcagagcacaattcgctcccaatgatccaacgccgtgtcgtcttcttcaggtgtgttgccttcgagtgtcaccatatctgaggcaaagcacacgaagaacggggtcgtcacggcgtaaaagacgcccacaaacacgataatccactcccaaagtcggtagcagcgcgagagcaggttgataaagtgttcggccttggtggagatgctgctggagtcagcttcaggcatcagcgagttggaagaagaagagcctcgacggtgtttggtttcttggaagaaggacacgccgcgtactctgggggacccggcctcattctgactcgagcgcgacgacgacagcttgttgtaccattcaaaccgctgcatttgctggttataccagtccagccatcgatcacgtcgcttgatccagaccaaatacaccctgaacagtgacgaaaactcggattggcggcagcgttgaagcagctcaaagccgagattgagcttgctctcggactctttggcgttggaatctcgtagctcctcgcggatcatgtgactaaagtgtcggtcgaatagtggcaaggactgactgcgcttgagcttccgctgtcgacgatgcgctcgagctgctcccgatggcagcattggtagaccaaacgactggtggagttcgtggcctgtaccgtgtggagcttgttgcatcgccacactgccgcgtggttgaagcttctgccgtagaccgcgttgacttggtcggttgcgagactcgtagttggctaggaagcgcataccatccgtcgtaaccaaattgcgcgtggcccgttgtgggcctgctccaggcatcattgtcccacaaaacgttttgcgagacactcggatcttctgagcagctttcgaggctgttggagcactttcctcctcgtttcgagcagttccttgagtgcgagtagcagcagtttggatttgctgtggctggagcaagagctgttgttgcggtgaaggctgagctttctggacgacttcaccgatgtatgcgtccgccatgaagagagagactttgtagcgacgccagcactcttcctccatttcagccagttggtcgtctcggtagtactcgcgcatactgcggctgacagggttgatctggaccgaggtgccgttcttgaaggacttggacttgaccagggccagacctgcagacgaattcctcgacgcgtgccaggacaagagacttcgactgtccatcttaggacttaatgctgccatcgttggacgtcctccgctatccggtactgttgaattgtccgcatagactttgccgaacttcaccgacttccgtcccccaggaagaaaatggtctctcaaccagcggagcaccagcgacagcgaacttggagaatcacttcccaattcaacagaggtcgtgctgccaccgtaccctgccgtctttcgtagtagttggcgcactcttttctcttctagtgccgaggccgagacataccgcgttggatcgacgactacttcagtctgatgaacgtgcgacttggtgctgagacttcggagctcgtcgattagtttcggcttggtggacctcgtgcgagcagaacccccggctttgatgtccttgacgatctccactgtcatgatgttataccccttaaggcagaactgcacccactgcaccaatgagcgttcagttgcttcagcctcttcgcgcggactcgaggctagcagctcctcccaggagcgtcgacctaacacgagaatctcgctgcatgtcgtggcctgcacggacgcaattcgcctctgaccccgcagaaagaaagccacttctccaaagaggctgccggctgtgagggtggccacgactgtacctgtggacttccagagcaccataccagtcccccctttgacgatgtagagcttgtgacccaggtcgccctccactatgatcgtgtctccagggatatacagctcggatttcagtcgcactgccagtccattgatctgcgtctggttcaagaagggcgcgatgcagacgttctctagtgtatccccatggagatccatcatcaattgcacgcgcagattgggggacaaatcgctgaaggtggcgtagatgtccatgcccttgaggtagtggtgctggaacttcaggtagtgcagcacgcgcgtacgaatatttgcaggtagattgtggtccttggcgaactggtcgaagtgagcttcgcgttccttgagctccttcttagtcttgtccatctccagaatgagctccgagagctctccgacaatgtgacccacgataaacgcacagcacaagcacgtgaacgtggcccaaagcgtaccaggcatgctcagcggaacaatctctcgagatccgacgagtgtcagctacaaattaccaagaaagcacgcgtgtttagtggataaagtaccaggaatgacaagtaaaagctcgacttaccgtggtcaaggcccagtaaaaggcccggaggtacaacacgcccacagattcgtgctccatgtgaacgatggggtcgtggtgggtccagttcttcgggttgtggtctgtatggcagatgaggtagaagacgcaggcagccaagtgtcctgtgaagagcaggatcagcacgagtttgatggggctcaagtaggctgaaatgttgccaccagcggagaagcgctgctggagacgcataatcagcgagtcgatggttccaggcacttggtgcagtcgaagcagccgtggcaatcgacataaactcatggctagaaaactgctgcccacgtagtagagcgggaggctgctgagtagatcgctgcgtagttcatgccccgtgtaggtcgtactccgctcgtccagagaaagtagattgcccaacccaacgccctcgcactcgaagtaatagagcttgaggtagatatcggcgaggagcaacgcgtcaccaatgaagtcggagacgatgagtccgagtcgaaggccactcgaagggtgcgctagaaatccaatgcgaaacgtgacctggaaggcattgtagatatccagcaccagcacaaccaggtcccaatagagtcgaatccgcatcttgatgcgttgctggccccagttctccttctcctcgaacatgctcgtgcactgctccgtaaacttggacaaggtcgagcgcgacttgatgttgtcgatcaccgcctcgagcgtcaacgtgtcgaaaatgtgctgctgcgtcgcctccatctgcagcgtctccatctctgcgggaaagtagcgctcaatcttcgagatgaaggccttgtacgtgataaccgacgcatctactacagtcgcagcaatgacggttgtgctgaagctcttctgcaacacaagttcgcatacgccgaagcagtcacccgctgacagagctccgactggaacagcccctacccgtttactgtagatattggccctgccactcacgacgacgtacatttgctcgcacagcgttccctccgcgaagaacgggtctccacgctggaataattggcgccggaaaagccccgtgagttcatacagcagacgctcgttgtgcgcatcgataaacagaggcactttccgcacagactcggcgtggaggatgctggagattcggtgacgcagttggctaggcagtccgtcgagtagctgcacctcggacgtcaccttctgcacgtactgttgctggtggtagaactggcggatgcgcgcgcggacgctctcggagatgcggaagtgaccgagcgtgacgttcacctcgttcatcttttccgagtggtggcggctgcctgccgtaaggttggaaatgatgttcgacatggcccccacgacgccatagttgatgatacccccgacaaatacccaaaaggctgcaaagtagctttcatacgttgaaaaggctacaatatcaccgtacccgaccgtcgtaagcgccacgatggcccagtagatagagcgcacgtaggccattttcacggtatagatcgagtccgagtcttgcaccttgaacgtcgtgcctatttgaccataagcgtcatacaacgtccaggaacaattcccatgaagaccagcgtctcgaagacatcggtcacgagtgatttcctcctcgatgggctcgaactcgcgctccaagacactgaaacgagccatgaggaaccaaaagcaccctactgcgtgcagtgtcaacgtcacatacagcaacatcgtccccgcctgttgtatcttcgaggaaagcccgcggatatgcgcgaattcctggatggtttgatgtaggtagcggcctcgaaggagacgcacaagcctcgtaacgtgaagccacatggtccagccgttgcctcgacgcacaacaaactccactaccagcggaagcgggacaatcgccagtaggtcgacccacaagccattctcccggtagaagtcaaagatgtagctcgagtcactcacagtgatgagtgcgagctggtccacgtacgcgaagaaccgcgcgcgcaacacgaaatccgccacgaaaaacgcctcaacgagtacagccaccatcgactgcaccgagtacatggacttgttgccgaacggaaaggtatccgcatcgaagacgcagtagagcggcacttcaaacaccacaaagatgagcgagaacaagcgcgcgtgctcccaccacttgcggaagttggagccgggcatccgccacgggatcttcttgattgtgactccacgcgcgtcgtggccgaacactaaactgtgtcggccagagccttgactgaagttgatgctggccgtgtcgttgtctgcggagcgtccgagcatccgcttcatcttctgctcttgttgatcgtgacgcgcgtgcatcgagcgcatgtcctccaagtgttgtggtgctttttcgcgaaaaaatatcttcaaggtcttgtggaaggagccctgcgggagtttgtacaggtcgcagtaggtctgagcccgcgcgcgctcgtccgagcggccggggaagagcaaacatccctctgcgaaatggtctccagccttggcgaacgttacctgtggatggctaggaccgtcgagttgaacgctccctcgcagcacgaaatacattccgtccggtagtttctcgatgatccagtctttgggcgagtagacccagtactcgatgcgcagggccaacgtgttgatgaactcgatgcattctttggccaagaaggccacgttctggatgcggtgcaccttgagaacgctgtagacactcacgcgtaaatgaccgggtagccgttcgatagcctcgtcgtggtgaagtgcatggtgggtagcccacacgttcttgtagtagctcagcactccttcccttacgctttcggggaagtgccgcatctgcatgtactctttggcgctgtccacgtgggccatgaactcctgcattctggcattcctgtaccggaagatgaagaggaacgtggccaacacggccgtactgaagatggcgcccacgatctgcgcgaagatcgcgtagagcgtctcgatattggtagttgcagccacgtcgtagaagcccgcagtcaccactgagcgcgcggcccagtatatggcacgtccgtactgcctcggcacgcccgtgcccactaaatagtcctcaatggcccagcacgtgtatccagatccctctccagtgggcgaaacaccagcaatcccttcgggtatcccgccttctccagcttcaggtatggtagtgaagactgtgtgcgcctttaagcagaggcgaaagtcgatgccgcactcgagatgtgcgactgccatgtacccgcacgcgatccagtgactccaagccacccccagcacgactgtgttgaacagtactgcattgcctgtatactcgagcatctgcacgatggttgagcctgtgtacatcttcttaagctcgcggaaacaacctggcactcgatacaagcgcagcatcttgagtattcgcagcaaatgcagcgaattcggttgtaaggatatcgacagaagctctaacgggatcatcgacgtcagttctagtagcacggccttgccgatgccgtggtgcttgtgactagctgggataatggtgttcagcgaccaggtcacgagcatcgagtcgcgcattctggagaatagtgacgacttcctctccacgggcttgggaccggttgttgcccgttgtcttctggctccaatggccccagtggcgtccgcagcgagtgccgcctgctccctccgctgtgaagcgaatatatccatcaaactagcaaaacctgcagcgtctgcgagtagatccaacgttgtgaacactgtgagctcaatagtccagccagtcttccagtctttgggggagtacgggtcgaacaggaagccgatccgtagagggattgatgtgaagacgtagaataattccgcgatgaccatccccaggaacagcgcgcgtcgtctgcgacggtagaatcgtagtatcctcccaaaggggccgcgccattccggcggttgtagtctcgggtctacccccgtggaagtgttcacggaaactcgcgtggatgttcttgtcatggatgggagcgctcgttaatcgactgagctgtctgtactgggtagtcagtctatggggacgtcgcgacgcgctgggtcatcgccagagtcctggaaatactgcacgatagtttgtggtgggtggttactgctaccattttggcgattctggagactaaatcgagtgaggtcgtgtgatgctcgaagaatgagatgaacactttaggggtttcaaaagctaactatggggttgaaaattgtacacaacagtgcaacagcagcacaaacctttgccttttacaagtccacaagcatgcactaccgtccagtgatccacgcaaactcgaaagagtagtcggcacctgccatgaattgaaccaaaacacgaatttgtcagaccactaccaagtacaaagtgaacgggctgacttaccaaagtgaacgacgcgacaggccaacgtcacgagcatccagaccatgagtttcccctgcacgagcgccatctgcgtctccagcacgaacgccaagttgtacaggatctttatcccgcagttgcgtcggatcagcagcgtcagcagcacgaatgatccgacctgcagaaagccaaagaagaagacaactcgagccgtgtactggacgttctggcgggtgacgttcctcaactccgtgtggtacttggcgttgggcaattctaccatgaacagcatgtaggtgcagtagaacagagggatgaacgcttccaggtaggccgtcagcacgagacactccgtcgtgtagagcacgccgagtgtctcccggaggatattcgagtgctcgatcaagtctgtggggatgccctcagggcctccaccagccacacgccctggtcgtcgcttggggactgtagtcggctgcgcagtggggtgaatagcagccagccttcgactcgaagcaaccctcgaaaagctgctcgacagcgacgtaaagcgaagactcgtgagcttccgcgtctctgatagaacacttctggtgctggaccagtggtagacctgcttggggcattcgatagaaccccctggaagtctttcgagtctgtagagcagttgaagatcctttcgatccagtttgtgccggaagcaggagcgtactcggaccccgctccgatattgggtctggagtatagctggagcttgaagcatcgaggtcaggacgtccaacacagtgtcgctatcccgaatgccagttgcttctcgcaatcgctgcagaatcgtagcagtccgtcgctgcattccgagtagaacggtcgccgtctgagcgaagtccgtgacgatgaagatcagcatggcgtggaacgtcgaggcgctctccatgcacgtggccaggtacagcgcgttgtagaaatccaccgtgaatatgacagcctcaggcgtcaagtcttccaagtgatgagtaaaatacaacacaacattcttgacgacgatcttgatcacaggtagtagaaggatcaccggtagcacgaagtcggtggtggaggccttgtgaaacagtagctggtagatcggatacagcatgcccatgatcttctgcgtggcgatgaagcagacgtacttggtgagcttcctgctcttacccaaaatgcagtagagtaagagaagcagcggcacgtagaacgctggcgtcatcgtgatgtagaagaatgggatggggaacgcgagattcgcgcctacgaccatgctagcacccgtgtagatgccggatattcccaatacgaagcatagaagctgccgtgatgaatacgcgaagtcgtcgaccatgtacttcccttgaacgaggtaggactgagagacaaagactccgagcatgaagacgcggaaccaaaagccgtagttccgatgccaacctgcttctggctcttgaaggggcaagagctcctgcagcatgaccaaaaacaccataggcaagggggttccaacgcagacgagaaccacacgaagcaacgacgtacttcgagtatacttgtcaagagcgagcacgcgctcgatcgagtacttcccgccgtagtagctcacttggattgatgcccagagacgggcaagacggttgaaaacagcacaacgcgacccccgcaggttttgggagcgtgggcatagtcacttcggagcctcgcgtcttccggggacggatgaatcatcaacagaactcttcaacaaccaagtaaaactccaataaagtacaagtcaacgcgggtagaaggactgtcagtggagcgtgtgagacagcagaacgcgtcagctattcctgaatgaagtgcaggagcgttatgcctttcaaaatacacttcatcttgttttgtcagcggacaaccatcttcaattcttattaattgatttacaaataccatggcatggtaccaaacgagacgctccaactactgtagaaccgaggagcaaaaccaaaatgccccataacttcaggccttcgagatccacgtgaagttgaaggaatagtcggctcctacgtaacaaaatccaaacagataagcacactcgaatcatggtcttcaattcggttcgacgtaccaaagtgaacaacgcggcaagctagagtcaccaatatccagatcatcaattttccttgcactacagacatctgcgtctccagcacaaacgcaagctggtattgcacattcatgccgcacctgcggcgaatgagcgccgcatacagaacgaacgacgccacttgcaacagcccaaagaggaaaacaaccgtggccgtgtagctcacgttctgtcgagtgacgttcctgagctccgtgtgatactttgcgttcgggagatgcaccatgaccagcatgtagtttccatatagtaacgggatgagcgcttccaagtacgccgtcaacaccagacattccatagtgtacagcatcgcaagagtttctcgaagaatggttgcatcttgagttcgacttctcgacagaactcgtgaagcagtcacctcactgtactgtggccgcacggatctttgcttgatcggctcagctggatgaaccacagtcgtcctgcgtcgagcaaaatacaactggagtttcttcaacggggacctggggctttccaacttgaaggaagtgcttgaagtgggtggttcactcgttgaccagctacggactggccgcgatgcttccgtcgcagcctcttcccacattgacagaagcgtgctatctgtcggagcgaggcggtgggggaggcaagagcgcacgcgcacgctcctgctcatttgagcttgaaaattctgaggattccggcacaacaagcacaaagtctccagcaaattctcatctgaatacgcaccagtggcttgacgcagtctttgcagaattgttgctgttcgccgatgcatcttgagcagaatcataaccgtctgtgagatttccgagcctatgaggattatcgtggttttgagcgttgaagcgctctccatgaaggacaccaggtagagcgcgttgaagaaatctaccgtgaaaatcacagcttctggcgtcaggtcttccaagtgctttgtgatccgtagaacggcgttcttggcgacgattttgatggttggttggagaagcaccacgggtagaatatactgtgtgtcgaccatcctgtggaagaggatctggtagagtgggtagaccatgcccatgatcttctgagcggctacgaatgcgatgatcgttctgctgcgtggtccaagaaacaaatacagcaacgtgaacagcgggacgtagaacgacggggtcatggtgatgtagaagaacgggatcgggaaggccaactcggtagcgaccgtcatactggcagatatgtggatcaaggagagccccaccataaaggctacaagctggcgtaccgaaagcgtgaacgtctcgctcgaccatgtacgttccgtggatgaggaaggtgttggccgtgacagccgacagcatcagtagatgcacccagaagccgtagttggcgctccatcctgccgcggggtcctgcagaggcagcagctcctggaggaatattaaaatcaccattggtattggagtcccgatgcacaccagcagtgcgcgggccagcgacgtagttcgtgtgtattggtccagtgctaatacacgctcaatggagtatttcccgccgtggtaactcacttgcagcgacgtccagagcttgagaatccgtgccaaaccagtacgaacacgcccacaacacaaaacactggctgttgtgtctccatcgggaagctgagctgcgtcaactgcagatgctgaactcgtcatgagttaataaaccgaccgatgtgaagagtgagcaggccggatcgatgctgagcaacagtgaaccacacttatccctatttgagtgcggcgaccgaaatacccattcaccactgaagctgccaaggcgaggcaaatgtagtgaccgaatcaatcctcagccttcatccaggcaaactttaatgtgaaatcgacacctgaagccaatgcaaacttgtcagtatcatcagaatggaagtattcaagacctctactgtagacttaccaaagtgagccactcggaatgccagaatgatcagcatccacatcatgactttgctttggaagagcgccacctgcgtctccaacacaaacgccaagtggtagaacgcctgcatgccgtacttctcgtagatcatgaccgcgaggagaccgaacgaaacgaactcgagtgccccgaagatgaagacagacttgaccgtgtcttgaacgttgtcgggcgtaacatcgctgagttccgtgtgatagcgagcgctaggcaggtaaaccataacgacgacaaaactcgcgtagaacaacgcaatgctggtgtgcaagtacggagcaagaacgaggcactccgacgtaaacagagcctccaacccctctcggagaatattggagcgtcgatacatcagcgagttccgtcgagagctccttctgtcccctgactgtgtctctaatgccgatgctgggagaatagaggtgcgagtcgatggaaaaggctggatcatagttcgtcgctgtctccagcacattcttgcgcatattcgaaagccacaggtaggtttctgaagaggaataacccgtgggagtgatgaccgagaagcgcgtgaacaacttcgtgagcttgatcgagctgatcttctcctccgaagtaattccaagctgagaagcacctgctgattacctgcagataacgcgtgcgggagacaggagcgtattcgaatcccggcaatgttttgcctgtccattttctcggaactgctgcaaattaggcgaagtaaagtcaccagtgatgctttgccgcttgatatccccgccgctctgtgagctcgtgccaatgtggtgcgacttcgccggtaaagccccgctaacattgataatgactgagagacatcgacaattatgataatcgtcactgtgacggccgaacgcgaggtttgcatgcaggttgcgaggtagaccgcgtggaagaaatccactgtgagaatgacggattcaggcagcatatcctccattggcgctagggaaagcgtgataatgtacttcacaacaaccttcattatcggaagaagcaaaatcaccggcagttcgaagtgcgtattcgacgcagcgacaaagagaacctcgtagatggggtacaccacaggcaacagcatctgcgcgcagataaatcgtaaatggatccgcatttcatccgaccgcttcagcatgttgtggacagttttccgcccaaagactacagtggaccaagcgatcagcagcgcgaaaaacacgggaaatgttgataacgcgaagaacggaacggggaagccgaccaatgatgcgattcccatcgccacaaacggataacttacgacttggcagaggaagagcaagatcagctgactcggcatgagtgcagtggactttatcatgtacttcgcgtgaacagcgacggtgacgctgacgactccagcgagaatgcccacgcgcagccagaatccgtagtttagttgccacccagcagagggatcgttcagcggtattgactcttgcgagacgacgaggataaccatgggcaccagcgctccagcgaccaccgtgatgacgcgcaagaatgaggttttcctggtgtactcatctagcgctagtagtcgctcgatcgagcacttgtggccacggtaactcacttgcagcgactgccagcggttaaagagattcactgcaccagcttgtagtcgacggatactgaactgtagaagagtggagtcggctagggcattcttcagcgatggattggtagacggcaggactagcatttgaagaatgaagctgtggtcgagagaggaagaatacatcggcgacctaacttgtactaaatgcacacacctacgtcattcctattcctgtgcgtcgccataaaaagagacgaaacgttgaattataattcggatcgaggctcacttacttaagaaaatcatcaattcgatactttacatttcccatgactttttatgggggggaattgtaactaaaatataacaaaacgcgttaaaaatgcgttttgcaatactgtacatgtatgttaatatgttaacaatcactcttatggggtatgcagtgcggcactggcagttgatataaccgcaaacattcaaattctgattcttattactacgccagctttgccccagtaatgcgagcaatgcgcgcgtgaacaacttttgcagagtttaattattacgtacttcaagtaatacttgtacttaaacttgtgagtaatgatgttgccgccgtggcgagtaaatagtagaagcacacaaaaagtctgaaaaacacacagccttaggggtaggtccaccatattagaaggcggtagtgagcggttgcgaggagcgtagccgtagccgtagcaaacccgcacgggtgcgcgcgaagcagggccgcgcggtatttgcggaggcgggcccagcgacgagcattccagcgagcggacccattgcagcaactcggagttagtttttctactgcgggggtctgggggtgcaacccccagaatgcttttattagaaggtccctgatttgctgtgtgtttttcacgcgttctccgccgtggcttcgtctgcaataattgcgatttcgacttttacttgtaactgggaatacatgtacgaatttaagtttgtgctggtaaactagcaaactggtcgccaaggattatccccctgttgccatattgtgcgacatcagcgataagctttggtgcggttaccagtagacccccctccagatctgtatatacgtagatatggagctgtctctaatgatcagggctggctacttgcatgacggatcactggaaagggtttgtagagcaagtacattacatccaaatacatgtgcatgtagttgccgaagaaatattgtatggctatctgtactggaacgtactactcagaaagttttaataaataccgcagtaagaaatcatgacgtgcacatgcatgcaaatacagtgcatgtagtacatgatgtaccgcctggctgcattgcagcctgcagggtaccggtaggtacgtgctttatctttcatgaattgtcgttcgaccttcaactctaatctctaagcttatgcgtcttgtcatcagattcccaaacggggcacgacgtgctggtttactttttttttagtattgtacaagtccgtacgtacacgtaataccccttttcactcgctgtcgtcgtcgtttgggggcgtgccacgagggcacaaagaggaaatcagttcattgcagcgcttccgctgacagggggtggcgtggaggaaccccctttaaaacgctgcaatgatcttgttgcaaccatttcgtaggccatgcgagaagttaggtgtgaatccatttgggtatatcgctccaccgcgttggatccccatcggccgaacagcttcacagcgagactgtcgaatccagcattgaatagagcagtagcgccaccactacgcagcgaatgggagctgaatcggtctggatcatccccgttggctttcgcagcacccatgatggcaccaactagatctcgggtctgtaagtttagtgacgcagtcaccttgcagagtagcgtgtccgcgtcaacggctagcgtacgatggtgctgtaccaggtaccaacacgctaggtcggggcagcactgtttcagacccgatcttgccagtgtcctgctggtgccttccccgaattggtccgttttgttgccgcggaaccgaatttgaaccttttcaattcgtttcagctcgtgttgctcttgatctttactatccaaaaagcgaacgtcagttcttcggattgcgtatgagtgcaatttagccccgtccgctaaatactctgatatccgcagcagaaagaagaagcccagtaccgaagccccccatatgactcagtgctgggcgaaatcgaagttgaggagcttatgcagtctcttgaggaattgtagagtgatgggtaattcgggtttggcgggggatcttctcggcgcatgccagtgatggcaagctggcgtcctggggtaaggccaacgccgtatccgcaaaatcgccgatgataccacgacacgtggctgatcttgccgagcacggttgacgctgagttgcctgcctttgagttaccccaaccgaacttccagcagtacgtagcaaagagggcgagttgatatgaatgatgctctcgctctggtggaagccactcggaaaaatggagaagtcggcaccacttcgtccactggtgccaggtgccggcatacttggtggccgacgtcgcggccaatgacttggcttgaagttcgctgaaaagttcatgtagagtttgcgtaaggttgggatcaccggtgatatctgccatgacacagaaacgttagcccagcgtgttttaaaaggttccgtccaggctcgtgaggctgcatccgccatccagttagttgacccaggcaaatgatcggctgagactcgaaggttgacgtacacttcagcgagaccaatagctctgttaatctcttggctgagttcgttatttgagtgcaaccgattgcactattgctcctccgagatattgtcgctccagcatgtcacatgcaccatactgccgccggaggattcgtaccaggttggacccatgtccagagcgctagagccatgcccaaatgctcacgcacgttgactgagaactgtttgtccgatgaggtgcgggtatccatgagaatttcctcttcgtaattgaacttcagctgaataaagttgtcgaccgctggattgagaaccgcaagtccacgattagacgaatccatgtacaactcaacgttggatgctggcaggttgccaaacatgctgacggggagtgctgctagataaccatgagctagaatattctgaaatcatagtaaatcctgcagggcgccttccgataactggatccgcgcaaatcgaggggctcttgctgtcagcgaatgaagttgctgatgaaaaggttttgatgtgcggacacaagttccaacgtgacgtagcgacccaaaaagtttttgaagctccttcttcgttgccgatcgtcgcgatagcatgacactgacccgttgaagcgctttcgcgatcttatcagctggaattgagacagtctgatcagttgtattccacagtaatcctagcgccaccaattccgagcagcaccccgagaacttcgttaatggaacgcgggccgagcacagcgagtatggcatgacgcaacgtaaattcagctcgatgtagccggccacctacatccagctcaactaagatgtgatcgtcaacccattcgtatccgaagaaagactcgttgtcattagatgtagatactgatgccggagaattagtcgacatgagccaagatatggctcggccaaacaagctgtaaaacggaggagagccggcccaactaaaaggcgctgtcaagtcaaaaacgaagatgtttagctccttgatgaaagcggccatccgaaatacgtgcgaagcaatcgtgcgaagatgtctgtaagcaccacgtacgccgccttttagaattcggatgcaagtggggtctccctgtttcgcgagatattcaattcgtcgggcaatcttagtgataggctcgtaattaatcgttggtacggactctgtcttgaaggaggaattggtcgactcgccttcagggtaagacagatcatcgattgtcctgtgtaacggggttacacgcacaagtggctacagtcacttgttactttaacagatgcgatgtcttttagaggtttgaacacttactcgatcttggtgtaaggtacaccaatggctacatacatttacgaccaccacgacgggtggttcatacacatttaggattcctgttggctgaaagcagcatcttctagccaatgagtgacttgcatgttagcagaatcctgccaaccagccgttgacagatccctagtttagaatattacatttagaggaagtcagaaacataaaacaaaatagcagctctcatctctttaccaaaacccgccacttggagtctttatcttgtttaaagtatactcgtagatctcgagtatacttaactcaagtaaaagaaaacctacgcttcctcatacacgtgcgcatacgtgtaagccgtagtagtgagccaaggtaggcccactacatcctaacttcgattgatggtcgacgcctttttttctctacggcgcccaatggactgcatatcaccgatgaccagctagaaaggatgtcggcttcgacaaccatgtactgcccacagtcttggccttcccgaatgctttaagtgactgcacgtaagtggcgacggcacgacccatgattcttggggggaggtcgacgcgctggtggtgtgcatgaccactccgcttcaaccccatgagtctcacaattttgatcagagctgcgagatgagggtatcctcgaaaatctttggccagtctagttgcatctagtgctttgttcggcctggtatcttgatccgtctagcctcggacaaagcggcctgagtcttcaatacttagccgctgagtacggataatacttgacagtgtgctgcacgcgacttgatcaatagtgtagacatctttacagcgtcgcatccgctcgtaccctccgatcttgtgcgcctgggaaatccttgtttcttcgcgaagaagttctgcctcgagagcgagttgaatagtagctgccaacctcaagtcggcagatctattggcgatttctgagggcatcttccagcactacatcggaaagcgttcacagtccccgtcattatgtcccgtctagtacctcgttgtgcgaagtgggttgatggtgttttggcaattgaacggagattttctgcggcgaccactacactcccttttgtcgacagcgcattggcacaatcgagctcagagaacgcgggggcaggctcagcgtcattcgtttgcccggctggcatgcactctatggtgcttgaacggagattttctgcagcgtccacatttgaatcctcagctggcgctgttttcacattgccaagagggcaggctcagcgtcgttcatcaaaagaccagtgccgtgtacaaggaaattggggtctgaacggagcgtttccgccacagcgtcgtcgctttcgttgttaaacgtcgcatgcataccgacagacttgagattcgtgatagcagccgcaacatcgctcttcatgccgattggcttggattgatctttagttacgacaggagtttggaattgcggcaccgccagggtcgtgctcacaagccgatccgttgcagatctgtgtggagagtcagagatccttgtactgcggcttcagaccttcaaaccgcttctcgatttcgactttcacgaggggctcgagtgatttaggcacgaagtgcgctctaccgtcgtggccatctccccgatcttctgactggcatcctgacaccgataggaaccggatgcagagtcgacaagtgacgcccgaactcgcatcctgttgcttagacaaattttggagcactttgggagggatcggaccaagtcctttcttggtaccccgagttcgggaaggtgtaggtcgagtcgttgggcgccctactggtgcgcctgccgtgtggccgctgctgctttttcctcgagctcaagaacacgttgatcatggatgtcttgtagtatttctcgtaggagaggatcgccgaggcgacattggctgcgaacttgagaaggctgcatatctgaacccccatcaatagcggagcgaaagttctcggggacatcattgacccagtacacaaactccatcacgtcgtctggatcttaccaaagcctgattatcttcgactcagtgaatgcgacaatggtatcgacgagctctgctgcggacggcacacagaattcccgagcaaatgttgcgaaaacgcgtgcagcgtcaactacctcgagtacagttgtgacgtgcggggctggctcgaagtcggctgtcgccgagaagttagcgaaattggcacctccagaatttatccactgcatccgttgtcttcgacccataaatttgaaatacgtaattgagagacattcgactccaaattctcaatcgaatgctctggtcaacactccaggtagcgacttgcacaacacggcctcgaaacgtatctggctgaatatgtataccgcagggtccttacctctgtgtcggtcggcggtcagcttgtcatgcagcgctcactctgcggagggagcaaacgcgtatttcgtcttcgtgtctgacgactttggaggcttagccacgacaagcgggagcgctggtggtttaacttcttcctgcatcatcggtacactttcgtccgccggggaactgccacggagctgaagaaaccggttgagtagtacaggatctccttagagcttgtcgacgataaaggcatccttgtcgacatctgggctcgattcgtttagtctagcgcgccgtgacgagggttccgcgagctcccgcggtgtggatattcctcgagcgcgcttggacgaaccgaggacgcgcgcttccgacagccgcggtgctggcaccgtctcatccgaaaattgtacaacatcctcggcgtaaggatcatatatgtgacacccagtatcagacgctggtggtgctggatgcggacgttcttgtacaccacccgacggtggtgctctgcaaaacagtgcgccagtggtggcggactcggagtccatcccgccgtcgacgtaatatgcgtagtctacggtgtgctgaagcggaaatgtctcttttaacccggtggacgggtcgatccactcccgcgccgactgtgcatctggaatgcggtcggcagagactggaccacccaacacttcaccgatgtctcctgtggaactgcaaccactccgtcctaaaattcggtcaagcacttgggtaccgattgatttgacttcttcaaaactccactcctcctttccgaacacgacattcattagctgtaaagccaccacgggagccacctcaatgacggcctcgatgggagcttcgacctgggtcccgtcagactccaccgtaaccttgtcttcctccagttgaaccacttggcccagcacgaaattggcgactgtcgtgacgacccctgggcgcctgcctagtgactggcggccgcacctgttcaccgtcgccgccttaaccgtgcaccgaagcgccgttggccgctgtacacatccttctccgccgtcaaagctgcgaaagtacatcgtctcctgctccatcgagaccacttgagcgaaggacgggattaatggcatacgtacaccaaatgtggattgcgtctccggaatgatgcacattggccattaactacgcaactgggggttgttacatatccttttcctttaagagtgttagaacgcgtaatatggttgccggggggttgagcattgtgtatcgataggatgcctgacgggtatccccgaaaactgttcacctcagcttctgtaaagctgtgcaaattttgatgttcctgtagactcggtcgtaaaccaacagcacatgtgcacatggtacttcacatgttttcatgcacccgcttaagaataactgtccctaacgattctactaaaatgcatgaacgccttaacgatacaccagttaaaatgcaggcagtactgaggtgggtgctggagttgcacacccagatccgaaaactaacctcgagttgcggtaagtaggtatgctcgatgaaaatggtgctcgccacagcagatctcaccaccaacttttttgaaacctgttgatgtatatgtttgtgagtcagaaattgcgatcagacccagaataatttcccggccaaaacaaattgagcatggtccaaacctgcactgaaatggtggcgatgcgccttaaaaaggtgtaagcttgatatatttaggttagcattctcgcgcatgcgtggacacctataattgggctatgtataatttagcgactcgacccttataagagtccgcgaacatatgtaggaatacaccatacattgtatttccattatgatattgtacggctgcgttcagcgccatgtgatgcagttttaccaatgtgaattcataggaaaatgatcaatattgatgtacatagagcccagatctgtatgttacagtatactaagtagtgttctatatcaatgaggcagatgtactctgtggcaatcttaatgtttacttcaacgcgacagctttacaattctgtaaacgtattcaatgcgttgggtttgtaagacacttgctggcgtatgttttcagcgtagattgctctgtttgaccacctcgaacaacaaaccgaaatactaaatagcaagtatgcgcttcaccaatgtagcatatcctactgtattgtgtgacggcacctatagtaccgagtgcccaagcttcatctgtctaaccagtaggagccaatactccttagttaatgatccacaccttatcttacgtgggatcttacgtgggatctacctgcaattgagttggatgcatttaattttcagtgaagctcaatattagcgacccaaaactggaagcaaagtctggatcgcgctactacaagctggacaatagtactaatctaaaatgaatgtcgactcagaccacagaccaattcaaagcccaatttcaaatgggaaagtcttccccgccgagcgaagggaggcgggcagccccacttactcggctaaaccgtgtactacgagccccgccttgcggggctccgctcggcttgtacacaataaataaacgaacattcatgcaagcacgtagcaggtaggacggaccgccatcgagaaaaaaatgtgaaaatacttatgctaagagacgactaaggtggcgagtaggtagggagccgtcgaattttcggaaacggccagccggagttttctagctttggaagcagccgatatatcagtttacactcgacaagaataggaaaaagagttgggtgatcgtggttcagctatgtttggatagacgaaggttttctccaatctgcataatcacgcaagtctctgttagtcgtattctccctacctcgatcacatggcgacgaccacgcgagtgtacccagcttccaacgttcaccagtctggtagcacaaggcgtaggctctctttcgaccctgttcgtgcgtggcagcagctgcaagtaagctattacggagggaagtactctctccatcgcgcgttcgctctgcgcgcgtacagccagaaaacctcgttatccagggcgctgctagtggtgctaggcaccccctttcctactgtagttttcgtcattgttgaagaattaatcccgcttcaaaagccagaggacgggtgggtaagaaactacggcttttggatacgaacagccatcctggtgtttgtggtcggccacacgaattctggccaggcgaggtatctcgtcgacgcggtggatctatctgagcgccaggttgtactgctgtgcgcctggacgacggtcatcttcactatgtttgccgtgctggtggcgtctcaaatcacctttccggtcccgttctttgtgatcacgatggctccgatgtttttcgtgctcctagtcgtctccttttgcattatggttggccgccagcaagtctacgaaatatgggcacaattcgaccaattactcaagtactttatcttcgttggcgcgcaggttatggtggcaatggtctacccgctgtacgagtcgctattccgcgcagtccaaggctctccgtatcaatttccagtcattttactgcttcctgtgatcaaactggcagtaaaatatattttacttcgctgcacgaagcacatggaagatatgatccccgaggcgatcatcttcaccgtcgacttttttaatgccatctacatggcgacctgcatgcagagtgccacctcggacgcgtcgattgtggccatgacggtgctagacatatcgcaaacgagcgccatgctctacgggttacacagacgcacgaacacgctgcaattgaagcttcgactggctgtgggcagtgattcagagggtaatgatttgctggctatgctgtgcacactttgtcgagacgtcaagaagtttaagcggcaggttcgagctgggattcagctacggtcctgctttcctcacaaattggacgatgacgaccaatacattcttcaaaatttgagaaataacgccagcaattcaaaaataatatctacggatcccacgatttcggtcccaagaacctacaacatgcatggtgttgcaccgaatgcacagaatttagtagctgtggacagacgagcttccacccgagccagtatacagtctctcctgcatccggcccacccaacaattctactggaaacacttgaggcgctcttcaccattgagtgtatcctcctcacagcgtatttggaagccgcgatccccatgttttactgttgctacatgctgctattggtaaacttcccaagcgcccagtatcatactgaaatggttggaattacccttgaaaacgtagaagagcgagtggttcctcttgttctgtttgggctcttccagcttttatcgtttaggctattggtgcgcatgatcaagcgcaattgtgggatggacgctatcaaacatctcgcgtttgttctggataagcacatgccgctgattcagggcaagttgaccctctggatggcagtcacggtctgctgtcgtgttgtacacttcggtgcgtcctcagctttcttcttttgctgagctttgtgctcgtactaaccgttgctttgttctcgatgtgttcacaggtatggacttcacgttcaagttcgcttggattaagtagccacagacgaatcaaacagtaaaaatagacgaagcgttagtttattacttcttctttgtattatactgatgcaggacaacatgctctatcgtcaacagaaacgagtaattagtagggtagactctgttctgattttcttactaaaatgccccccctgctctccaaaataatgacccccggcaggatccaaggttccgcgccattgttatatttcgtatatggtcgaggcattcttcgactcgttcggtctatcagttcggatgctcagtgcaccgtgtttttcgaaaaatatgctaagctttatgacaccgaatgcgaactcgtctcacttttagtctaagaaaatatttcgaggcgacgaacggggtcgcggtatagtcacgggggactccagagcttaggaaaacctagtcgaacgaattcaaaagtgaaatcgactcctaaagagatacaacacacaagatgcctcattagcactcatttcctaacaacaaatataaaaaaatatggttgcgattacttaccgaaatgttttacccgaaagcacagtgtgataatcatccagaggagtattttgcattggactagaggcatgtgcgcctcaagcacaaatgcaagctggtacaaagctgacattccacagttccgtcggatcaacgcagcgagcatggcaaaggttccgacttggagaagtccaaaaacgagtagtggggacaccgttgagaccacagtctcctgcgtaatagcagtcatttccgtatgataaaaagcgctcggtaaatgcgccatcaccaacatgtaactggcgtaaaagaacggaatgagggtctccaagtaggcagtcaggataatgcactcggttgtaaacacggtttcgagagtctctcgcaaaattgtgtggtacttgttgagagagggcctgcgctcttccacagtctgcactaccggtgcagcactttgcgcttgtgcttcttgtcgaggcaggatggctctcgttccactcttggtcaagcgccaagagcaaaatatcaagcggcggctcgctttcttcggtaacctgtgagattttgtagctacggcactagggcttgcaccgaggctgttgagcacggactgactcatcggagacagctgaaggcacatgcttgagcgcgtgcggattccgaattgtgactgtcactcgtaactctcctggttgcagcataaggagcgagccgtggtcagaatgttgctatccttgaaaggtgtgccgatgtccacggctcgctcaaggcgagacaataagctgctagtgcgctgttgcagcccataaagcatgacaaacgtctgtgttagatcagttatcgtgatggccatgacaccggcaatcgacgttgcgctctgcatgcacgtggacacgtagagcgcgttgaagaaatccacggtgaatataacctctaccgggaccatatccttattcactcgtgtataccgcagtacatagatagcaacttgataagagggagcaccatgataaccgggagctgatagccagcccactctccccgcagcgcggaacaagagctcgtaaagtgggaaaatgccaacggggaggtctcagcaccgaccaattgaatgtattccactacttgatcacgactagcgataagtttccgcacagcaacaccgcccatgatcagtcgaaacgatatcatcagaatgccgtaaaagaggggcattgtggttagcacgaagaacggaatggggaagatcaagatcgacgccgtaagcatcgtgacggcggccactccaatcgagacgctcccactcagcaagataaactgatgcaccgtgacatggaagtcgtcaatgaggtatgttgcttgaaccaccaggccatttatcacctcccatacgagaaccacagctctgatccacagcccgtagtttgcgctccagccgtcgagagggttttggagcgggattgactcctgtatgaagacgagggagaccatgggaagtggggtgcaagcacacaccagtacgactcgccagagagaagtcttttgggtgtactcgtcgagagcaagtagtcgctgaatggagtacttgccgccgtaatagttgacctgcctctgcttccacatgtcaaaagtgtcgtggcgcatggtttccacaacttttcactccaaggttgtgctgaagtaccagtgctgtcgccgaacgcagcgggtattggcgctacactcgctatgaacactggcattggcacttcctgaaggataagctcaagaacgcaaggagcgttagcattcccgaaatactcatgtacatggcccatatctgcccacatatcgactccataaattcggaaagcacgaggcccgctcaacgagccaatgatcagaccaccgaaaccttaattcatgataccacggccgacttatcacgggttcgaaaagataagaaaatcacttgaagagaaaaagaaaacaatggtagttggaatggctaagtaccactacgaagtactatcccttccggacataataatattatgtttcatattatgaaacacttctggggggtcttgcaaaaatgaccttgaaaccaaatcgaaatgttttcgcggccgctagggcacatcagggctagaggagatggcgttgattttatccgcggcaacagcgaggccgcataccaaaaactgaatgcattaacgctacggacaggagacccatagtgatcatgatactgttagaaaaggcaaccaggacataatgtgaaacacaaggaaaaacgatatatttggtttaccggacgtctatagactattagacgatgtactagtagttagaagcagcctaccaaagtatataaaagcattggaggccacatgcatatgcttaagggtcacttagctgtctaatatggtagaattagctcccatccaaccgaggtcgttgccggctcgttacttaccccctacggcttcgcactctctctatcgatcatactagcctttgttagagccgtaacatccatctagagtagataaagtccgtagcaatgttcgcttggcacctttattgcccacaccctgttgcaggtcccatacaaagttgagccaatgtctcgactaagtacggttttacacataagaggtagcaatcgaaagcttagaatgtggagaatacacctggctagctcattctgcataaaactgcactgaattgacattatgtgggtacttgtgttttcaccatatgatttgcaaatacaaatctcaagtaataagtgtttcagaatagtggactatttcacgttttgtccggaggggatactacaaagttgttgtgtctttatagagctgtctatgtagctctatccctgtggataccagatcctaggaaagcccaatcgaataaattcaaacttgaagtcgacacctgcacaatcggccattagcaacaaataaaaaaacacacacgcatttatgatagcacgtaccaaaatgggtcacccgaaagcacagcgtgatcaccatccacagcatcatcttgcactgaatcagcgacctctgcgcctccaacacgaacgcgagctggtacagcgcctccatcccgcagttgcgcttaatcactagcgctgaggaaacaaaggacgcgatctggagcaaaccgaatacgaccaacggaagaacggaagatacgacgttgtcgcgcgtgacgccctccatttccacgtgatacttgacgttcgggagatgcaccatcagcatcatgtagctactgtaaaacagcggcatgaacgtctccaagtaggctgtgatgatgatgcattccgttgtgaagacgatctgcagtgattcgaggaggatggtggggttcttggacgtcatgtgcttgaatgtcagcgccttcttagaaaacgttagtcgagctttgtgcggatttgtaggtttggcgacgtctggatagatactgttggccggcttctgggtgaaggtgaagcggaagtaggacgactctggcgggatgttggagacgccagggcccgcaatagccgtcgatgcttcttgcggactctgacgctcaggccctggtgcggggaggattgtatccagagtatcgagcagtcgcttattcacatccgagatttggtgaggaagacacgagtgtttgcgaaggcccaagtggctcaacctccttatcatttctcgattgtgaaacagtgagcacatcattgacaacacgtcatcgctctctttcgcgtcggcggcagtctgccggagtcgtgacaggatagtggccgtacgacgctgcaatccatagagcattgtgatagtctgcagtaagtcggtgattataatcgccgcgatggcgatgggcgagctcgagctctgcatgcaggtagccacgtatatcgcattgaagaagtcggctgtgaaaatgacttcgacgggggccatatcatccagcgctttagcgaaatgaagcacaaggttcttcagcgcgacctttatcactgggagcagtaaaatcacaggaagttggtacttcgttccttcagcagcactaaacagcatttcgtagactgggaagatgaagactgtcgacgtttgagcgcaaacgaagcgcacacatcgacccacttggtcgtggtgggtcaacatttgtcggaaggcgtgagaacccacaaccacccgaatcattacgaccagcaacaagtagaacgggggcgtaatgaacatgatatagaacggaatggggaaaacgcagtaggccgagaccaccagcgagaacgccacgataatcgccggcatgatcacgtaaagttgcagcatttgaagcacggaaaccacgaagtcgtcgatgagatacattccctgcaccaataaagcgtgagtgacgatgcccaccagcaccgctgctcgaaaccacatgccgtagttggcactccatccctctcttagctcttgaagcgggaccagttcttgtccgaagacaagagcgaccatggggagtggcgtcgtaaagcagaccagcacgactcgtgtgagcgaagtttttttggtgtactcgtcgaaagctagcactcgctggatggaatacctccccccgtaatagctgagctgcatgcgctgccataagcgtaggactgccgaggtcgaagcgctccgacacgtcgtgcgcggtctcgcgcctatcaagtcactaggcgttggtgctatgactgccatcgtgagctaaggaaattgtaaagcgagttgttgctggatggctccaaataaactattcgacaaagctggcgcttcccgatatatcgggtgggtgtattcgtgtggactgatgtgctccattccgaacagggtctccgaaaatagcattgtcaataacactatttcagaaaataacaataaattacgcatttcggcgggttcagccatctaccgtgataatttattgatgtgctttgtgatattacataatttatgacagttacctttatataataatgttagcgttttaccagccatcttctcgcttccagtcgttcagaagaactggaatcactggttgtctgcgttgctagttgcagctcatttggcagcgctcacttttcaattttcacttctcaagcctccaagacctcatccagcatggttcgcgctatccgcccccctcgccctacctacgcgaactcccaagtctcggggttttacttccgcccgtgtcgcgacgagaacgacgaggtgattctcgagtatttccgttgccgttgcggcacggttcggaagcaaacccataggaacgggtactccaacctgatgcaacatatcaggcgggagcaccctgactacaagaccgtcatgctcgacgctacgacggcggagacaggctccctcgtgaacttcgtccgccactcggcgctcaacctccacggctggatggtttggattgtcatgtgcaacctgccactctctttttgtgagagccgagaagctcggcggtacgtgtatgcataaggtcattgtgtttacattactacggaaactaacaactttactttatggatgttattcagctactccagcctggaccccatctcggaggaaacgctgcgggctggcatggacggggtcgtcgtcgccgtcgagcgttcgattgcgtctgagctcccagcacgcttcggcatcatgctcgacggctggacacacgcatctgagcactacatcgccgtgttcgcgtgctatgaggtgaacggctgtcccaagacaacgctactcagcatggcctcgctgctggacgcgctggacgacgatctctccgcgcagggccatctcgagtttctagcgaccatgctgccgcgcgattacggcgtacagctggcgcagtgtcgcttcctcgtagctgacaactgcgccgtaaaccggcggctggcaactcttatgagtgtgctgcttgttggttgcgcaagccaccgcctgaaccttgctgttcaggcggacatggcgtcgcatgagcaggacctgactgctgtgcaggcgctcatggtaaaattgcgtactctcaccaaatctgccaaactacggtaagcgccaatgtgtatgtgtggtgtgtcaatatgtttctaacacaatttgtgtacttttgtaaaacattttacaaaatagatcgaaaacgccacttcggcctgtcattcgccaggatacgcgctggagctctacgttcgagatggtacggcgctacctccagctcctcgagtttcttgacgccgaagacgacgacctcatggacctgctgccgccgccggcgatgaacaagcgactgcgggcattgtaccaggagctgtgggacatcgagtcggtctcgaaggcccttcaaggccacgacgtcgacctgctggacgttcacgagtggttcgacgagctgatcgctgtcaggccacaatatgggcgctacattggtaagtttgtaactgttgaatttgtgcttaatattttcactaacaattgtataatggtttttattttgcagggcctcgggccaacattgtgcacaccccagattttgaggctgggtgtgtacgcgttctccgcgggaaggcgcagcggctgacgcgtgctgaaaaggccgctttgcagcccttcgaagctgccagaccggacgacgcggccgcgagtgaagaggaggaggatccagccgcgtcgttcgtggagcgtcttcggaagcgccggcggcttgcacaggaccgtgtcaagtttgagcagctgaagagcatcccacgtggtggaacgcttcttcagcattgctcgggtgacgtttggtcatcaacgacatggcctgctgccacgcacgcttgagacgatttgtttctccgccagaatcggtcgtactgggatgcaacgactgtagacaatttgagctagatgataagctaactggtgtcttgttaatagacttcatgcttttcataatggcattatttattgtggtacgttgggggcaatgccataatgtactgttgtattggtaggagcgtcaggggataatttattcagcaacgcccaacctactaaataaaaatgccatattcggaggccctgattccgaatcacgaagttgtaattgcaagttgctcgtgatgtttttttatttatttatcatgctacaattctattctacccttgtggtatccagaacctcggagccccaagacgaacaaattcaaacttgaaatcaacacctgagccgtcattagtacacaagtaagaaaaatgagcataccttctacaatatcaatttccagggacaacgcaccaaaatgctgtacacgaaagcacaaggtgatgagcatccagagcaccatcttgcactgaaccagcgccctctgcttctctaagacaaacgccaactggtaaagcgcccgcatgccgcagttgtgcttgatcagcagcactaataccacgaacgacgcgatctggagaatcccgaacacaaggagcgggacgatcgtggtcacgacgttgttacgagtgataccaatcatctctctgtgatattgagcactctgtagatgcaccattaccatcatgtagctgcagtagaacagaggcatgaacgcctcaagatacgccgtaatgataaggcactcagttgtgaagagcgcttcgagcgatcgtagaagaatcgttggacgctggggtgacgatcgtgggttgtaggttggggtctggggtggcggaggtcgatgcatagaaactgaccgagcttcaggtgcaatagcatgcatggctttgatgcgtttccgtgaacaaatggctcgaagacaagatgcctatgcgggtttcctttggtaaattatggggagggatgagacttggggcgagccgtgaggttgtgggtctggttcagttagaatttggttcaggctgtcaagtactcgtgtattcacggaggatatgtgatgaggcaggcacgatcgtcttcgaatccccctgtgtgcttgcctctcaaagcggtcgggatggcgacatatccagcaaatcatgctcagcatattgccatgatcagtatcagcatcaccgacagtttggcgaagttttgatgagattctggtagtacgtcggtgcaatccgtaaagcataaacatcgtctgcgatagatcggtgagtgtgatggctactacagaggtagttgaagacgagctctgcatccacgtagcaacgtaaacggcgttacaataatcagctgtaaaaatcacttcaaccggaatcatgtcctccagactcttggcgaagtgcaagaccacgttcttggtcgtgactttcagagctgggagaagtagaatcacgaaaatctggtagtgcgatccagctgcggctcgaaaaaataattcgtacactggaaaaatcacaattgtcgaggcttgagcgcatacgaagcgaatacagtgcatcgactgatctcggtgctccagcatgtgccgaatagcggtggaccctaccaccactcgaagaaaaaatgtcaagatgataaagaacgggggcatcatcagcaatgcgaagaatggaactgggaacaccaagtactcactgatgagcatcgaaagagccaccacagccaccggtacacacaccagaagtataagcatttgatgtgccgagactgtgaattcatcgatgaggcagattccttgcaccacaatcccgtacgtcacaacacacacgaccaccgcgcctcggatccacattccgtagtttgcccgccagccttcattgagatcttggagcggaatggattcttgaccgaagacaagaaccatcatggaaatggcgtacacagacaaacgaaaatcacccgcgctagtgaagttttgttcgtgtattcttccagagcgagcactcgatggatggagtacttgccgccgtagtagctgacctgcatgcgccgccacgtccttgcaaggcggaacccccatatctgccagcgatttctccgagacacctgcaatgccgagtctgtcaagtcgcggccccgctccaacgctggagctactggggccatctcaagtcgaggacgaatgcaacgagaatggaaagcagaggtctgctcgaaataaagcgatatcacgtcaacaatagctaggtatactgcagatattcctattttggcttttatagggaattctagcccaggtcactgggtgcctgccaaaagggtcataaggacctaacatagttaccgcagatatgcgggtggatatgtcgacatatagcctagttgcacccgccacaacatggttatcgacaacaactccgcccgattacaaatgtccaagtaccacctctattcgccctacagcgtcactttgctccggacattcctatggctagatctttctgcagtttatctcagcatgctcatttacgattcagcgctcttctgcccacgctgccgtggtgatggagctccagaatgacacgtgcgacgctctgtgcgaggtctacgtgagctacaacaaggacctgggcgctgttcgacgcgcgattcacaagcggctggtggaagaagatatttgacagcctgtcattgacaggcgatcttcacaagaatgatggtcgacatattcaatacaaagtcgtagtaagtcgttaagatgggtacacggcataaccgccagtttatcgagacgattttccggtctcacgaggcttatgccgagcatatctgctgcatttactccgggcccttatgaccgttttggcagtgggtgactgtcctttggtgacaacatcgacaaagttcggacttacatattggcaactagattggctccatctaacggcacatgatggagactccgtacacgtttacatgaaggttgaagcgtgtgatgttattttttgttactgttagattgagtacgttccaatgtggagacctcaatgtggaggacgcagtgtcgtcggcactagggaagtgcactacgctcccttaggtgactgctagctgtaaaacccctttttgaactggaaactgaaatcaacacctgtagcaaccacaaaaagttgtagttagtatgaatcactgctccaaccgcctagagttgctctacgtaccaaagtgcacgatgcgaaagcataacacgataagcacccagaacataaattttccttgaatcagcggcatgtgcgtttccaacacaaacgcgagctggtacagcattttcatcccacagttccgcttgatgactgctgccagcaccaagaacgttgccaactgcaggattccaaagttgaaaactggcaaaatggttttcaccacgttgcccgacgtgactccgaccatctccgtgtgatagcgtgagcttaccaacatgtagctacagtagaagaaagggatgatagcttcgaggtaggccgtgacaacaatgcactcggtagtgaaaagagcctcgagcgcttcacgaagaatcacggggcgctgcgccagcacacgttgacttcctctctctctgtcagaccggggcgtcacctcccccgcgggctgtgtaatgggataaatggtctcgctgctcttttggacgaatatgctgcggatggagcgtctggcgctacacctgggaggcttggcattggggatagcaattctcggcgatgacgcaagcttgatcaacccgggagatttcacgagctcggagcttgctctccttggaatactctccagtgtagttaggcgatccctgtctgcagtagctaagccatgagaaatgcatgagcgtaagcggatttcggcctgtgaatgtattcgaaacttgttgggatcacgacataatgcgctgagcccgctcagtaagttttccgcctccgaatcattgctaacattgtggcgaagcctggacaaaagcgtcgcggtgcgatggtgaagactaaagagcacaacgattgtctgcgatagatccgtgagcgtgatggcgacgatggcagtggcagaggacgcgccacgtatatggcgttgaagaagtcgaccgtgaagatcactgcctctggcatcatgtcctccaagtgagtcatgcagcgcagaacgaggtttcttatggcgaccttgatgaacggaaggatgagaatgacgggaagttgatacgcggaccctctcacggcgcgaaataaagtctcataggccgggtacgtgaaaaccatgacgttccgcgcccctacaaagtagatgtatcgaacggtttggtctcgattctgcagcatttgtcgaaaaatggcatctcccagcacgattcgatacgaagtaattaacgccacgtagaatattgggcacagcgtcagcacgaagaacggaacggggaagatgagagcggctgagatggcgagggctccaattgtgaaaagaagggatgtgagcgcggacagcagcaatacttggagcgttgatgttgtgactccgtcaatgtgataaatcgcctgcgttgtcaaaatgaccgccaccgtgaaggataaaattcccgagcgaatccagaacccggagtttgctctccacccgtctgctggctcttgtagtgacaataatgcttgagcgctaacgagcaccgccatagggacaggcgtcccgatacacaccagcagcactcgcgatagcggtgtgttccttgtgtactcatcgagggcaagcagccgctcgacggagtatttgccgccgtagtagctgacttggagatgtttccaggcgtgaacagcgctcgacagccagcgtgatagcgaggcaagacgcatcgatggcgtagatggccgagtgtaacattgcgagggagatcgactccaagaataacatctattttgttacgccatggccgtctcgtagcttttcagaagacaattgggccacaacaatgagaggtcccagcgttctagtgggggaattgttgcgagtactccttgaagaaccttaaatagtccaagaaagtctcccagttcgggttggttggcgcaggtcccttttcagggagccccagaattgcgcgtacctgcttgaatgactttccctcgagataccatcctttgaagtccagcctctgcttggcagccgccgctttggccactttggcagcatgttcctccatctcctgcacgtacttcaggtagttctggaatgccgcccaattggcgtggctgaccgcctcgcccgttgctggaagccccaagaaggagcgcacctgctcgagcgtcttcttgacctggaaccagtctcggaagttgtgcttcatgttgatcgcctccagctccgccttcaacttggcggtggcggacgggttgagcagtctctcttcgtcctcgtctgtggcaccgccatcttcttcgtccataacgttagaagaccttaatcgtcgcgtgtgggcttcagccgacggagcgaggtcggaggaaaccaccctcacgcgctggagttggtcggaggccggtagcgcgcggcaatttgcgagcaatgagaccccattcagaattagtaggagtagcccgatgcgtggtgagcgcatggagatcaaccccaagaggagaaagccgaactgaacacagtttacggagctgcgggcaaatcgcctggtttcgggtttccctggactcaaccagcaaggtcaaccccaacacccgccaaatcaaggacaaaaacaaggaccaaaagttagaagcttacgctggctttgtttttgaaagataagccatcttattggtacttaagtacggagagaaagcctttgattcccacttttaatcctttgtgatgcgtagtgtccaccattatccataacggcacaagctacagttgaaaggtgtcattaataacatattacatttcatttttgtcctggattctaggacaaattccttaaaatgacttgagttcagtatagggcttcagccgttacaccactcgaacagttgttgtctttgttatacatgacaccctcgtacttacctggatcttatttccttccatacaacccccaagtcacttttggtcctaattgctggttctagcacaaaaccctgctaaatacggcgtacttaagtgagtttcggtcctagatcctaggacaaaaagagttggggttaaaggatccacaattgcgtcgactaatccttccatggaaaatgcatgatagagctgcgagatctgttaaaattgaggtcggcgtccgattgcttccgcgtatgcctggcgaaagaatcttcgccaacgttgccactcaacatggcaagattcacatgttgttggttcgaaattagggcggcacaaaaataccctcagagccaatccttttcccgaagttaacgttggtgttgttcttttagcacgataaagatttttgtacggctctgattggtctacctatttttttaaagtaacgtaaattcccgaataataccccttacccgtatagtaccctctaaaacgtagcccaatgtgtatcccagggttacaatgttacttccatacaaagatcaagtatatatttatgaatttattgtcgaaagcatgtttatgtatgaaatactgcgtaatatccaaaatttagcatatttgttttgaaaatgggagggtactaataaatagtgcccggggtattattcggtcatttccgttaatacaaaatagtaagagcaacatgaataaacaaataatactatcattactacaatataaatctagtataatacatattcttttatatattgttattataattattctaatattagcactactatattataatgctagtataatgacgttatgtgttcttgcttttttaatttgtagagattgttgctgatacattatatactactactaatatgtaatgttagtatactacgtattcgtgtttatattgttattggaatgttctagtgttaacattactatattaaaatgctagtgtactaacgttttatgttggcaacctactgtatagactatcccagcctagagttcgctgcagtatatataacattccacatcggccacacaatgctgctgcggcgatgcacgagcttgcgcggcgtgcagcgttccccatgccgcgcctccagcctccggactccgtgtgcgccttcttcatcgacttttgcgtgcgctaccttctcgtcgtcgccgcgcgcgccgtcctcgccgcccaagaagacccgcaagaagcaggctcggctggccaacctgcccgtattttggccaatcgctggtgtgtcggcgccgccgcagttgcgtccgcatgaggtggacatcgtgaaccggctgttcaaggtggacagcactcttattacgtccacatcggacccgaccgacctgccacagtgggacgtgcctgaaatagcattcgccggtcgctccaacgcgggcaagtcgtcgttaatcaacgcgttaaccggccagaagtcgctcgtgcgcacgtccaagacgcctggacgcacccagcagctgcactttctcagcgtgggcggcaagaagggcagtctgcccgacctggcgctcgtggacatgcccggcttcggcttcgccgcggcccccaagaaggtcgtggacgagtggcacgcgctggtgggcggctacgtcgagggccggcgcggcaacaacctcaagacgaccatgctgctcatcgacgcgcggcgcgggctcggaccggcggaccacgacttcatggactttttgcacgacctgggcgcgctctaccaggtcgtgttcaccaaggcggacacggtcacgcggagcgagttggagaagcagatccagaaggcgcaggatgtcgcactcaacgccgatcgcatggtaggtgggacgcgtggatgtcgattgggtcgttgtggtggctgacgttgtgttgttaaattggtagagcatgaacccgatcatccaggtgtgcagcgtgaaggagggcttcggagtgaaggagctgcagcgccagcttgtaagcatgacggagctgctggcgccggcgctggactagattgtctgcatgtattggacacgatgatctttgcactcaaagcagctctatttttcgcgatacgtgtgtgtgttgagtgttgtgtttcggtgacgcttactaggtgggtcaaaagctggacgtgtacgcctctggttcggatcgctcgcaactagcatcggaaccctcgtcagatcggatgtcgtcgttttcctgaacccgaagccgcgaatgccgctgctgatcctcgtcgcgaccagagttctgcaacactgggagctcggagcgcacacgggctaagctgaagcgggttttgtcctcaagtgcgacatactcttgatcgtaggatggagctgtcttcagtactcgaacgctgctgtttcgactacccccgtccaagacactcggcagcatcagaagcgtactgtgtgtgtttggatactcgggcattgggcgaaggcgtaaactggcccgtgaagccgcgagatcgacattcattgtggctttcaggattgcgctcgatatatttcgtggggtctcgtaagagctcttcggacgacttttgctcttcgagcgtcgcgaggtggtcaccactttcttcgggaacgtcttcaacacttcgtcaacgggtggagttcttacgacgatatccggaggttctttggcgatacaaggtgctgcatcttcaagcttcggacccagcgacgatgccgctatcggcaaagtggtgcgtcttagctccgatttgctgctgcgctttttcttcttcttgcttttgctttcgcctcttctggacgtcgggatggctgctgacttttgctttactgcgttggtgcgtgtgtgtttgcgtctccgagccttcttctgattgtggccagacttcgacgtgcggctcttacgcgaggggaaatcttctggggcgcttgagtatccctcgtcatcgacgggaccatcgtcatcgggctgctttttgcgctcactgtgaattcgcggactacgctgctgtgtcctgccgtctggactcggcgggatcggctcctcttcagctccagataaatccgagtccattccaccgcccgcatcgtcttccgatcctacgcggtcgctgatgtccattccagaatgggcgaacagcgccgagatcgccgcttcgcagtcaagtaggaggtctctcgcaaggcgactctcttcgtcttcagcctccatccgaagtgacccattctcaggacgcgttcgtcggccagttggagatggcacagcgatcgaggtttgcgttcgatcgtcgactgctgcttgcctctcacgctctgcatccaatgctttgacttgcgcggtgagtccatagtacacgagcagactctggcaccacgatcgccccatttcctcgaggtcccaggtggaaaactgggtgtccttgtgcgtaccaaagtctgggccgcagaagctcgcttcgagggtgtagctgttggtcacgcccagctcctggttcactacgactcgcgcagtggtgagcttggatttgtggacactaaagtcgcagctagcgaaggagaaacacggcgcgtggcgcgcgacgatcatggggaagacgcgcgggtcggtctttaccgtgttgctggcaggactggtggccgtggctgcgtcagcggaagatttagcgctgtcggagccactgggcctcttcttactggtgtagcagccgtacgtgaagatgttgcggttgatactgtgcccgtgaagatcgcagtaaatggccacgcggccgtgggcttggaagtgtgcgagctgctgcttgaggtggtatactgtggggaagagctgctcgatggggttgctccacttgcggttgagatcccagccagccagactgacgcgggtattgccgttgatgacgccgtcggggttaagcatcggcacgatcttgaagatgaagttgcggcggagtatcgttgcgccgctgcttggtcctgtgaggtaatcgatcatgccctgcatcatccagctgctgttgggctctcctggatgcacgcgcgcggacaacacgatgactggacacaacgtcaccaaggcgtattagaacacggagggtacttgaccgaagatgacgatgatggcaactcactccggcgttcgtcgtgggggatcccgtccttcgctggagacgtgatggaaagcaggtcgcatggattccctgccagactctgacaaagttcagttcgacgacacgtaagtgaacgctgggaatcgcgctcgagatgctccaggtagtccatcagatctacgggccaaggcacaacacaagcatacaagtggacgtgaacatcgatttcgtggacaacaagcaactagcgaacggtgtaccggtgtacgtgtacggctggatgcaggcaaagtacacgcagtcgttctcatgctcgaactcgtagtggaaagtcaacgcgttggctcctggttgggctgtgggagatgtggcgacgtcataccgaacgtgcgtgcctcgatgcctccagccgacaccttttgttgccgcgtcgtgctccgagtaaaccaccggctgcagtccctggccgaacagcgctccgctcttcgcgaggttcacgagcgcgaagcggtaggtggtccccggtctcccgttgcgcacctcgaagtagaaccactgacggtaggcgccgttcttgatgtccgggtggatgagcagttcgtactcctgcaggggcatgtgagacgctgagccggacttcggcgtcttgcggaagatccgctcggcgcgctgcaggttgccgccctcgaacaacgagtcgaagatgagcgtgtcatctggagcgctgctgtctcggaagacgtcgggctggttgtactcatacacgtggagacgcgcgagtacctcgagctcctcgtacccctcgtcctcgcattcgagtagcgctcggctttcgtggaggatcggctcgcgcttgggcggctggagatggtcgaagtcctcgggactcttaggacccccgtcggctttggctttcaacgcggctacggccaccgggttggggatgtgtctgcgcactggcaggtgcatcggacgctggctttggatgcccgtgcgggccaggcgggattcctccggcaggttgatgagaggcagtggaggcggcagcaacaaggactggctgaaaaccttgcggaatcgattggcacgggggttggcggtggcattgctcattgtcgctgcgtgcgttggaacactgagtggggattgaacaagatactgaattgcagtggcgatcttgggacttcgagtacgtggaggttgaagctgacaggctcacgctgccatgccgacaaaaaggacgaacaacgagggagtacgaagagtacgaaggcgacggtgaggagaagagagcacttgagctgcagggcttggttggggtcttgctgtaacggcccgatcgtttttcatgagtcggcgcctcctctgctacggtcagtgcccgtttagcatcgagacggcagcaggagcgtaagatggctagcaggttcgagtactgccgatgctaactcacgtggttgctgtgtctgacgtagtctgtgcgtgacgcagcacgtacgaccagctatggcaggaggccatgtcggagctcaacgagcaggtccacatcgaggaccacacgctcggggacggccaggaaggcgctcccaacgaggcggtgcgtgctatcagacttgtgctttaaagctacctacccactagcccatctaaccactctttgcttgtgctttgcagccgccccaagcgaccatcgtcgaggcgttccagcactacgcgtgcctgtacatcaagtacatccagatcctgtcgcgcctgtccgagtgctacgaccaaatggtgcacccgcagaagcgcatcgacgtcaagcaggtgatcgaggtcgtggccacgcgcgtggtggagctcaagcacctgctggtcaaatggaacccgcccaacccggacgtcatgacgcagcccgagcgcagcttcccgtgggaatacgtcaacctggacgacatcctcgtggacctcaagctgcctccagagacgctcgaagtgcctgtgccgcagtcgttccttgacgaccagcaggaggatctgctgcgccgtgaacgcctcgtcaagggttacatgaagctcaaacacggcgtggattccatcccgctggacgcgatcaaagtcgcgcagtccgcgctcgctagcggcgtgggcgtgttttcgctggacgaggccattgcagtgatccagcgcaacgagcgcggtcggcagggccgtcaacgcggccttctggtccaggaactgcgcgaggaggagcgtcaacgcaagctctacgaggccgcccaaggcgcgcctgaaatggacccggacatcgcggctgccaacattcagcgcatgtttcgcggcttcttctcgcgggcggcggcagcgcgcgagcgtgacgcggagctggttttcatcggcatgaaggcgcccgccacggatcgttccgcactggagaagcgcctggcggacgcgcgtctccagcgccgtgtcgagcaggctgagaacaaggaggagtacgagcgcgcactcattgagctgcacggagtcgtcaccaacgaggaaggaccgttcatgaaggagaagatgctggaggagagacgccgctggatcacggatgtcatggccacgggccagctccctgaagacctcacgggcttctacgcggcgttgaatggagagatgactcccgaggagctggccaaagctcaggctaaagaggaagaagaggccaaggctaaggctgctgccgacaagaaaggagctaagggggccaagggcaagaaggaggagaagaagggaggcaaaggagctaagggcaaaggcaaagatgccaaggagcaggaggaggaagcgcccgagaagccgcccccgctcacggggccttccgagctctgcaagaagctggcgggaggggtggcccagtacgagaaggtgtggctcgagcgcgaggatctggacaatttctaccagaagtacgacgtcgctctggccaaggacgtggtgcgcgggcccgtggaagtgcaggttcggcagcaggtggacgagatgctggtgctgcagctcgtgaacatcaaggcgcagctcgaggcggccgcttcggctggcaagaagggtaagaagggcaaagggaaaaagggaggcaagaagggcaagaaaggcaagaaaggcaagaaggacggcaagaagaagggcaagcccctccctggcgagaagatctcggagcttaagggccgtgcgccggactcgttcctgagtgtgctggtggagcaccagatcgtgcacgcgcctcgtccgggcgtgcgcgtgcgagatttcgtgggcagctttaacttcctgggcaccgtctaccagcactgcgagcggcgcgatcgcttcggcaactgggtgcctcaagacccgtcggctgcccaactacgccagtcattaacggagtatggtgtacttccgcttggatcgccgtttgttcgagcgcgtacgccaattgtgcgatcaatgatgctgtacgggcctcgtgggtcagggaagacgatgctggtgagcgcgctggcgaacgagaccggagccctgctactcaatctgtcgccaagcaacctcgttggtaagttcgcgggcaagaccggaccgacgaagctcgtgcacatggcgtttgtgctagccaaggcggccgcgctgcagcccattatcatctacatcgacgactgcgagcagatcttcgcgggcggcggcggcaagaagagcaagtctgcagccaactcggaaggccccgtccggttcaagaaggacctcctgctgtacatcaaggcggcgctggagccttcggaccgcgtgctagttatcggcacgtcggcagacccaggtgcagccgaggtgaaggacctgcgcaacttcttcgacaagttcctgcacgtgccgtacccggactacgcgtcgcgcgtgctgctctggaagcacgcgctgcgcaccactatcgcagctcacgcggccacgttggggctgtcgtcagcggctacagcagcggcactggctgctgcgtcttcgtcagcgtccacttcaggctcaggtggaggttcggcctcacagattcaggaccaccgacgtcgggagcccattgatatctcgaccttggcccacatctcggaaggctactcgtccggcagcatcgtgcgcgcggtagagaacacgctgacgcctcgacgcgtggagtgtctggagaagcgcccgctgcgtgaggaggagttcctaggtgctctgtcgcgccagactgctacgttcgctgaggaccacgagaagttcaagaacttcaccgctgtcatcacgggcctgaaggacacgcgcgacaagatccgcaaggccgcagcagacgcgctcaacgcggacgacaagaaggatggcaagggcaagggaggagacaagaagggcaagaagggcaagaagtgagactttcgtactagcatggaccgatggatatactttcaaaaaaataccaagtgttctgctttgagccactggtctacatcgatcgcttcagtgcatccctagatcggaggaagcttgagcacaggtacgtttgcgaagctcgcagcttgtcgctccttttgctgtttctgctgctcttccgcccagaactgcggcggctcccatcgggtttcaccggttgtctcattctcgtagtagatggcgtccgtgtacatgtcggtgcgcaggacccaacgtctggcttcgatacgtgcgagctgctcctcaagctcccggttctgcttctccagcagcttcttccgctcgagacgggccttcacggcgttggcgtccaagcgactggctcgagccacctcgtgccaagcttcgaacaccgctcgagtaccaagtccacgccatctctgaagaacggcgcgcatctggagaaactccttggtggcctgctgcgacaccttcgtgcactgcatctccacgtacgagtctcggatttgcgtctggaacagctcgaacagttcctcttcggggacatccaggggcatgatgaagctcggcttcttcacgacggccgtgacgctgaccttctctttctggctcttggggttctgttcttctagttcgatggcgcgcttttcaagctcctgatccactgctttcacggctgcgatgcggtagtcgtcgatgctcagatccggcatgtcgatttggaagaacgaggtgcctggagcctcggtcggcgctgatgagctcacgcgcgaggcctccgtctccggggcttcttcttcctcttcttcggagtcttcatcatcttcagcgtcagcgtcgtcatcgtcttcatcagagtctgcagcttcatcgtcgtcaccgtctccttcgctctcttcttcttcctcctcttcctcgtcgtcgtcacctccgatggcggcattcatctcgcgcgctcgagctttctccgtggctgttacaagcttctgctcttccatgtcaaggccttcgatcgctagctcaagctcgtagatcttcccgttctcaggcccaagctctgcctccccgtcctccagctcggatctcaacttggaaagttttttgtccagcttattcagcttcttggtcttcgctgctgccaacgcgcctcccttgtctttgccagcggcggcgtcacgttcacgctcgagcgcttctcgatccttctcaagccgtgaacacttatcccgcgtggtcttcatccgcgcctccttcgcgcgttgaaaggcctcaatcttccgatggagtttctctcgtcgagcgtcgacgtgccgctggttcttcatgtacttcttgtagagtttacgcagtcgtctacgccgctgaaccatttcgtgagccaaaacgcgagctgtacgctcaaagtgagccacgcccaaggtggagttgatgtactcgatagcgcgtctctgcgtcttctggacgaggcgagccactttggcacgtaggtagatgctggcgagttggtcttgagcttgctctttggtgagcatctgcgcgcgcagcagtctcccagggcgttgacatcgatacggcgctgttctcggcagacaaaccttccggacgcgctggcctcgttcacacagagccactggatcaagacacgcacagcgacgaaactcgatggggacacttggaacttctcccccgccagcgacacaagccatgccgaactcgtcgtcgtagttcaagagtgcgtcttcgacttcctcaggagagaaacgctgcgagaagggcgttggaggtgcttgctgctttgaccttgactcgtccgtttgtggctgctgggcggccgacactgcgagcgcttgcttgcgttcgatggccgggagcagctcagagaagaaactctcccagacgatgccgtacaacttgagctcgctgctggtgccctgtggcgctaaacgatcacagttgggctcgaataacgacgtgatgactcgaagatcatcgtcaacggtggcattgcggtgagtgttgttgctattatctggctgtgcctctctcatctcgtcgtcttgtatgagctgggctgcgaaggccaagacttgttgtagggcttcgacaacttctcgtctgctgcttctctggaactccacgagggctttctccatgaagcgcagcgtctcggggacgccgcgagctacgacgtcgctggtgggtaagcgcagcgggttctgctccatgcagagaacctgcaagcccgtcaacgcacgaaaggagaagggaagctcttggatgcagttccagtccagtcgcagctctcgaagcgcctgcatctcgccaatagctcgcggtagtttgagcagttgattccgagacgcgtgaagcacccgcaagttgggcagaaaaaccacagcgtccggcagttcctgcagctcgttcaagttgagcgtcagcgttgtaagcgcggtcaactctccgatcgtctctggcagctccgtgagtttattggcactgaagttggcacatcgagcacttcgacagcccccgatggacactggaagctgcgtcaaggcgttgcgttcgagccacagtttgtcaagcttgacaagttttccgaaatcctcgggaagcttctccagagcattgcaggacaagttgagggcggtgagccccgtgagttttgtgagagagtcgggcagctcccgcagtcggttcttggtcagatccagctccgtcaagcgtgatagtgctccgatggtttctggaagtcgctcgagtccgtctgcgattagtgaaagggtctctagcgacggaagagctgctggtaagttctcgggcagctccagcaggttgtggcccgtgatcctcagcgccaggaggtcacggaagggcatcacccgctcccaggtgaagaacccacgggcctctttccacgcgatgttgagctctcctgtgtgcttggcctcctgagcgaatggggcccatagtcgctcgttctcgagctccagagcttgaagttgctgctctcggtcgcggtcgcgctgcttctggcgctcttgaagctgctcaccgagccatgcacgacgttcctctcgatcgatcgacggcttcttcaccccgggcatactcgggtcagcgctgcagctagagcctggagctattccaggaccccatgatagtaatgactcattatcatggtagtgagtcattacgcacttcaagtgcaagtagtgacgccgaaagcatgctcactttgctttccgcctcggaccaagacggccgaactcctggactgccaagccagacccctctgcccacgcggaatgctgcgggggcctcggcgctggtgaccggcgatcgagtggacaagaccgaggggacataaggaccaagacagcctccaacttgacgcggacaagtacgttccacgcttggttcgcggctaaagtgcggacgtgcggggtcagtgcggactgggccctttcctgttggccacgcgtcttccaccccagcaccagtgcgtccgttaccgacaggctgcgcatcgttctgggctctcagaatgcggttgagtaggtcagcgcgtggaacccgccgacttcgacctgtgaaggcgtcttcagcgtctttgtcttctctgtctttgtcgctgtctcgggcgtccgtgctgaggtctcgccaagcgttctgcggagcagaggacaaaggtcttgcttgcctctcgtgacctaggcggatagtgaatgcaaaaagttaacttttcggtacacttacacggatatactcctctcgatctagcctggtttcatgctattgcatgcagagaattgtaggttgcagtccctctgaaaaaattgaacactctttgcatgcaagttgtgcatcaacttgctattgagctgacacaacatgaactgcgaagctagctcccgattcttccaacatacttgaaatctgctgcttcacatgaaccgagtagaaataccaacgccagcttacggagccacgggcgtgaaccccttgcgtggcgggttgagcggcgccgtaatgtgcttcttggactgggccacagactccttggccgtcagcatctggtccatcttctccttcacgcggcgcgcgtagtgctcgtccacgtccttgaaattcttgagcgtgcgctcctgcacgggcttggacgcgttcacgagcgaggtggcgatgttgtccgtgagtctctcgcgggcatcttcatccagcaccttgcggtagaacacgcgcacttgagtcaagttgtcatcgaacgccgacgagtacttgtccacaaccgtgtgctccccgtcgtacgtggtgtagcgcagcgactcaacctcctgcggtccccccatgctgttcgggaagtagtttggcgtatcgcccatgtttccgttcacagcaaaaggaccatcacgctggtatgtctggggctcgttcaacggacggttgactggaatctgctggtagttcttgcccagtcggtggcgcagcgtgtccgggtacgagaacagtcttccttgcagcattttatcgggcgacggcgcgatacccggcaccatgtgcgagggcgcgaaggcgagctgctcgatctcggcgaagtagttgcgcgggttcttgttgagtaccagacgcccaacctctttcagcgggaagtcggcgtgtggccacactttggtcacgtcgaaggcgaggaacttgttcttcttagcctgctcgggcgtcatggtctggatgtacagcgtccaggtcgggtactcgccgccttcaatggcttcgaacaggtcgcggttggcgtagtccgggtcggctccagcgaggaacgcggcttcgtccacgggcatgttgcggatgccttggtccgtcttgaaatggtacttgacgtacgtgatcttgccctccgcgtccacattggcgaacgtgttgctgccatagccgttcatgaaccggtagccgtccgggatgccgcggtccgagaagaggaacgtctgctggtgtagcgactccggacgcagcgagaagaaatcccagaccatgttggcgtccttgaggtgcgaagctggcaggcgcttctgcgagtggatgaagcttgggaacaggatcgggtcccggatgaagaagataggcgtgttgttgcagaccaggtcccaattgccctcttcggtgtagaacttgatggcgaaaccgcgtgggtcccgcatcgtgtcggcgctgcccgactccccggtgacgatcgaaaatctcacagccacaggagtgcgcttgcccacttccgaaaacatcttggcgcacgtgtactcggtgatctccgggtgcgtcatctcgaagtagccaaaagccccgcctcctttggcgtgcacaacgcgctccggcacacgctcgcgatcgaaatgcgaaagatgatcgatgaactcgaagtcctgaagcagaattggccccgtcgacccggcagtcgcagacgctgtcagcccgaagcgaggcatcggggccccattactcgtcgtgcatatcattggaggcggcatagttggggtgttttcttggctgcgttagtcctagatccagcaaatcgaaaactgattcaagatcgagacgagagatcatttgctggccaccgttaggtcggacgtggtaaacacattgggacgagtccagtggaactctcctcagtgtgtctcgctgttccttctcgttctttttggtgtctgggacggaggagctcaactaaccagccctatttttgccgcgtttctcatagcgaccaaggtctagcgcttatacttcgatggttccccgttcctcttgcttcgactgcatctgctcctgtggtaaagtgttgctgcaaagctggctggagttgcaagtgacgcatcgaggtggcaagtattctattgagaggctgctggctctggaggaatacacaaagacagcgtctggccttcgagtgctcattgtgtgtctaggtacgccactaccgatgatgactttgacgatggcgcaagaactgctgcctctggagagaccgagtgcagggtggagagaaaaccacggcttctgggtccgcttggctttattgggggctgtcatcgcccatacagcagcagttcaagcgcactaccacgtggatcaagtgtacttgtctcgcatgcagcgactttcaattggagggttggttggtatctcgttctcgattatcacaatggggatctcttctgctagcatcttccctcttccctttatcgtgatcactggcgtccccctcttttacccgctgcttcttctatctctgtttgtcattgctggatcgcgattttccgcgccatggccgcagactggagtcagaccttccggtatataacatacattgctacccaggtgttgatggccacgatttatccttgctatcaagtactgttcacgtttgcagtggatatcgactacgaacttgccgcgattctgctcttgcccctcatcaaaatgttcatgaagtacctgctctcgatcacgacgacgcacatggaggacttgatgcccgaagctgtgatcttcaccgcagacttcttcaacgctctgtatgtggctacgtgcatgcagagaacgtcgtcattcaccacgatcgccattatgatgacgcttgatttagggagcactgccatgagtttgctcgcgctttaccggcaaacgagtaacattcttgatcgaatacaccgcgtaattggagatcggaaccgaacgagtttgctcacctcagtcagcattctctgccagaagacgcatattttcgagaagcaagtccgagcagggtcgaaagttcgagcgattattcagtaccgactaagcgatgcaaacaaagctttggttgaaactctggataaagtaccgagtatgaccgcaagaaatcccagcccctccaaaacgccttggtatcgaagactcttctctcatcagtgggaaaagcgagtcgggagcgttcaccccgcggagagaaccaatccacctacggaggggccagttcgtctagagaaagcgtctgctgtccagagcacgtgcattttacaagacactttggagacacttttcacggcggaatgccacgttctgaccgagtacttggaggcgctcatccccatgctttacggctgtttcgtcctcgtggtagttcgcctccccagcgctgaatatcatatcgacatgagaggcgtatcaacggccaacgctttttccactgttgacagtgtctttatcctggcattgctagaaattttctcgtttctggtgcttgtagtcgtgatggagcgaaattgtggcatgaaggccttctaccagttagcatttgtgttggaatctcaaagcctgctggttcaagataaacttacgacatgggcgctcgtgacaatggcatttcgagtagttcacttcggtaagatctgtatgttcaacgttactggtagggtcgcgacgcaaggaccaatgtcttatgtgtggggattatgattccaggcgttgatttctcatttcaattcgattggattagtggctaacgtgggccagagatggattaataactgagttttgaagaatggagatacttgtcggtcgatcgcttcctgtaatcagcccacagattgtattttagtcaatatctcttgatccacgttctataattaaaaaatatcgtgaaacttgctgttactactagtaaaggttgttaaagtcgaagcaggcctggacgtccacctttccctgaccgagccagaggcgctatgattcattcatcgacaccaattctcccacaaccagaaaagacaaaagcgcatcaaccttccacaggaacgcgtactgcaacatccttgccgctcctgcaatcgtggttcttcaatgcttcgcgatgtttcctcaagttgcaactaagtcacagtggcggtaagtattccgtcgaacgcttgatggctctccacgaatacacgcaaaatactccactttggcgcgtgctgctcgtttgtttctgcaccccactgcccatggttctgcttgtgttatcgcaagaagtcatcccactcagagaccctaccgctggcggcgcgcaaactatggctctggatccgaatgggggttcttggagctgcggttacgtacgcgttgcttgtatatatctcctacatgattgaccgtgcccagctctcgttcaagcagtttttattgacctctgttgccgttggagcgacctattcgatttccgccatgggtatctccgctgcctggacgttcccaattccgttcatgggcatctcactctggttcgttctagtgttctggattgtggtgtggttttgcacgttcgtaggctggcagactctacgagatatattggcgcagtgacgcagactgctgaggtatattctctttatttcagtccagattgtgatggcgatcatctacccgctgtaccaggtgctgtttgacgccatgcagagaacaccctacgagctgtcagtcattttcctgttacctctcatcaagctcattatgaagaatggcctcgctctcacggtcaaccacatgcccgacatggttcctgaaacggtgatctatacagtggagttcttcaacgcgctctacggggtgtcttgcatgcaaaaggcagcctcactcagtgcggtagcattgatcatggcaattgatctctcccagtctgtcgtggatctgttcgaagttcaccatgctacgaagaacaacctggcgagactcggagctgttttaggagtgggaaatactggagatggacttgtgaccgccattcagcccctttgcctgggtttaaagcggagttccaacgaagcgtggaaggatttccgtgtgcgatcatgtttagcgtacaactgttatccgacttctgaatctagcccagacctcactgctggtatcatgcgatcacacttatccacgcgtacaacggatagtatccgaagtattgtgtattatctgggacatcgcgccagagcaagtatccgtccgagtgaagctacaagtccagccgcatcaagtgcgcacaaaagtatcccattagcaccctcggagttggctattttagaagaaaccatggagattctattcacttccgagtgcgtgattctcgacgagtaccttgagtcagttgttccctttatctatggcagtataatcctcatggtagtccacctaccgagtgctccctatcacacggagctgatcgggatcaccgctgataatgtggcgggtacggttaagggagttttttgaacggtatcctcgaactggtatcgctagttctagtgatcctactgatgcggcgaaactgtggactgaaagcactccatcttctagcgtttgtactggaaactcacatgccactggttcagtgcaagcaaatgatttggatcttgatgactttggcctttagggtggcgcactttggtaagagaacactatgttataatgacagtcaggatgtacctaatccctccacgtgctgtctacgactaggcgccgacttcacctttaaatttgcatggactgtcaggtgagggattgcacgagcttaattgaagaataaccgctcttgatttcaaaaatttataaaaagctttggcgacagtatacagcaacgttaagttttcgtgcttttagagatcacaactcattcatacgattgtacgaatttcgcttttcgtaccgagattaaatcttgcgcctcggtttggaagcagacatgaatagtgtaaatgcatgcaaaagtatgcccgtcgcgacttcggttatagttagcagcgccaacgcagggcaaatggttgccgcaaaaatggttcgaccggcggactcgacgctgatagtcccagacagcacacacgctcaacatggagcttctctacgttcctatctcgaccgactgactcgtttttggttttcactccagctgagtcatcatggaggcgaatactccgtcgagcggcttatcgcgctggatgaatatgtacaacgcacttcgttcttacgcgtggcactggtgtgcctcggaacgccaatgtctatcgttgtagtcacggtgatacaagaggtagtgccactacagaacccgagtggtgattggagtttgaactatggactggattcggttgggactcttggtggcagttttaactagtgcaatgggcgtacattcgacgtgcatgatcggaggggcctcgctatccgtattgtagcatctattgttggatgttacggtggtaggaactacgatttctgtctgcatggttgttgcagcgtactggacctttccgattccgttcgttcagatcctgctgaacatggtcttcgttgttatcgtggtaatttcatttcgagattgttgggtctgaagcattttaccggctgatttcacgtcggaagaagctttttcggtacctttgtttcctggggctgcaagttgggatgacggtgatctgtccatcctatcaagtcttgttcgaccacacaacagacttttggtcagagctagcggtgctgtttcttctccccgttctcaagatcatcctcaagaacttcttgtcgtattcagtatctcacatggaggatttggttcctgagaccgttatcttcacggtcgacttcttcaacgcggtgtatctggcaacctgcatgcaacgcgccaactccgtctttacgatggcgataatcatggcgattgatctattacagaccgtatttgcgttgcatcgccttgatcgacagacgtgtaggatcttggcggagctccgtgtaactatggagaatgaaaatcataccgataacgtgaatttgctgagtgcaattcatgctctgtgcgacaatccaaggaagctcaaaaggcaagctcgcggagtgatccgtgtgtactcgtgcatgccgcatcgccttaccgcgtctggatctgggctgttacgcagacttcacgggccaatgggcgatgcagcgaagacagaatcgtggatcactcggcccaacctactcgaatcccttaaggctgttactattgggagtcggactacgtaaaccgggtcatctcgcgcgtccaacagataaagctagcagccctattattgctcgagggttttcatcccgaaagattctgccaagcgggcagcaaggcgaaggatctcgccatcttctttacgacacgcttgaggtgctatttacctctgagtgcctactcactgaatacttggtatctgctgtcccgatgctctatgggaactacatcctgatgatggttcggctccccaactcaaaatatcacacggagctacagtgtatcactcgtgaaaatgtcagccacactgtgcagaccgttttcgcttatgccgctcaggaatttctatcatttgtggcgctggtgcttctatacggcgaaattgccagatacaggccctctaccaggttgcgtttgtgttggaaacgcacatgcccttggtgcagacaaaattaattagttgggtactggtcacgctatcatatcgggtcgtgcatttcggtaagctctatccttgatctaaatctacgagaccatttgctaataccccattgattgcctctttcaggtgccgatttcacatttaaattcagttggattcgtagccaaggaggctaacatgatccgataaatatgcaaaatccagacagtgtcaaagttccgtgtctctatctaccgtggtatacttttgttgttcctctgtgatatgttttatttcgttggacacggtgtgtgggtgcgtacaagtgattttagttccaactgggtaaaggatatcgcacactgtttgtttgaaaaaagtctctgaaccgagcactagcccacaaccactcgatccaaatgttggttcatccgaacagagcacttcttagtgctctttaaataaaattgaaatttaaagagattcaattcagaagacccaactttctaactcgatacatttatagttcgtgtttggtgctgcctcgaaatagtcagtcagacatctacgcaatcgcgttcgcacacttgtcactagagagattgcacaccagcacagacaccatggcgccgtctacgcggccaagaaatcggcttcgcgctttgctgagagcaatcggtcgtcgctggtcgaaacttcagatcagtcatcgcgggggcacgtattccgttgagcggatcctggcgctgagtgaatatgcgcaaaagacatcgacgacacgtgatttgctggtgtgcatcgccacaccggtgccgatgattacagtgattcttcttcaagagctcattcccctccaggatccgcagcagggaaacgctacgagattgtcgtgatcctcctcctccccgtgataaaacttaccatgaagaacttactgtcgctcactattccgcatgctcccgctggaggtcattttcgtcgtagcctttttcaacgcattttacctggttacgtgtgtgcagagcgcgtcttccactagcgcagtagcgacaattctagccctcgacatttcacaatccgtgctcgagttataccgtcgtcacggccgtactcgaagtatcgctcgaaaggtgaaacaggcgattggatccggcgacctgaaccatttggtcttgctcaatgccgtacaaaacgtgtgcgaatccccggataaactggactcgcatctacttcctggaattcgactgcgctcgaactcgatcttgaaaacgcagcacaacggctggctggggaatctcgagaagaggcgagaaagcgagacaaccacctgaatgacgtccccagattcgagcatgatcgagcacagggccaagtcaaatgcatccggccaagaccgaaaagctgcagtcgttgagattcttaacaagtgcttgtctcgaaatcgctcatcggtgcagccacttgcatctattcagatgtccgtcagaccgtcttcgccggtcgatacgatacaagctcagccaaaacaatctccagcaaccgatcaacccaacttcctcagcgaagctctagaagttatcttcacgtccgaatgtctcgtgttgaccgagtatctggaggcggtgattcccattctctatggtttatacgtgaaagtgcttgtcaatctccccagtgctcagtatcacatcgagcttcaaggcacaacggctgacaatgtggactcgaagctgcagagtatctttgtctatgctgtgctggaatttgcatcgctggctgtactgatccttgtgatgctgaagtattgcggcgtacaagcactttaccagctggcgtttgtattcgagaaacaaacgatccttgtccaagccaagcacgtcacctgggcattgatcacactatgcttcagggttgtacacttcggtacgtttgggagacgaatgcacatattttcttctgggtttgacggattcgttgttatgaccaaaattcaggcgtagattttaccttcaaattcggttggacgcgctgagacttaggaaacatccattagtagtagcattagaaaaaaaatctttcgaatcttacactaacgttcacagctcaactgactgtgtgttccaacgatattggcacatagctcgttaaggcaggtctgatcactgtagagttttgcaaacatccagtccaattttattcatagcgtggctgtgatggtactcttcgtcccaatcgcgttataagctttggtatatttctggcaagtttcgcatcagcacacactatcgacagttcatttagcaatgaccagctctgtatctcctgatgcctccgaacgggcccccagcatgcaacaaagaccagctacgcacacgaggaccgaagtcgtacgggcaaacgattgggtcctcaaactctccaaggcctggctggcagtacaattaacgacctacggagggaaatactcgattgagcgaattctagcactggacaagtacatccaacaaacgccactttaccgggcggtattggtatgtattgccgtaccgactacgctgatcttactagtctttggccaggaaagtatccctttacaagacccttatgaaggctggagctcaaattatggcttctgggtgcgcgtttgtttacttggagccgccgtggggtacgcagccgcaacgtacgttgggtatatgatcgacggagcagcattacctcgtcgccaacttgcgctcttcaccgtaggagtggcgatgagctacactgccgtaaacatcgcagtggcagcttggttggtatttccgattccattccaggctttttcaacgaacgtgtttataatgttcatattgatcgggttatatcgggtcgtcgttggaggctctgtattccgtgaagtttttgcacgacgaggtgagctcttggcgttcaagaactttgtactggtgcagatatccatgctattggcctatccagcctttcagattttgtttggacttgttacgaatactcgatgggaggtcccggttttgatgattctgcctatcatgaagcttgttatgaaaaacctaatggtccgaactatcaggcaccgggaagatatgataccggaggaagtcatcttcatcgtcgacttcttcgacgcgttgtacctggccacgtgcatgcaaaatgcttcgtcaactacgtccgttataggggtcgtatgtcatcatctgatccagagtgcggtcgaattgcgtgaattacggaggaaaacccgcagtacgttcgttcggctacacaaagtcacgggacttcacgataggaatttgtttacagctgctagggcactttgtcaggagctcaaaagtgagctacacgctgatttctcgagtgtccaagtgtactcgagtgttccccaccgagtgtcagctgagagcaagattctacttgaagcgttaatgtacaaccagaaggtagtatcatctcgcaaaagtccggtaccgccctcaagcaaaaaccacgtctttcaactcctgctaagctttcgaacgacgatacacccagcgtcgactgtagcaactccaccaagcaacaaggagatatcaagatcttcagcttcagataactctgccgagcggaagacagtggaatgtgcgcggcttctccacgacgtagctgaggtgctgttcacgtccgaatgcctcgttctgacagagttcttggaaacggtcatccccattttgtatgggaactatgtcttgttgatggttcacttgccgagtgcgcagtatcacactgaaatggcatatgtcacgaaggaaaacgttgccggtatggtccaggggatctttgtgtacggcttcctcgaatggctttcatgtacaattgttgcggtcatcatgtaccgggactgcggaatcagagctcttcatcagctcgcgtttgtgatcgagacacagattcaccttgtgcaggctaagcttgttctctacgttatgattacgttgacttatcgcgtagttcattttggtacgtcccagcatgagcttgggggttctggtctctttgctatattttctttgtagtctaaaccacgcttaaaattctttgcaggcgcggactttactttccagttttcctggatgaagacctaatatgaactacggcagctagcttaaactgccatgtctactagcagaggcacaaaaagaagatatgtgctagctcatttattgtcgtgtgtgtgcaaccactggaacttaaaggtgtaatccgttcctgaataacagaagcgaggatggttatacaaaaggcaatgccttagaaatcctaaaatggcatttccagtatgcgtaccaacgtgttgaatggatgactggagtacgtaaattatccaaagtaccagcagcccttggacaactgtccaatccgttttgagaacaaagctcagaattgattccgacactagattgtatcgacgacggagcacagccagcaacagtacggacgaaagtagctgcaacgagcagtagatcagcaggctgcgtatcgttgtcagaagttcagcctcggacatttcgtcgaggtgggggaaatacttgcgattcggaaaatggtacactgccgcaatgtagatgactataatacgaacaagtgagaaacggggctgaatgccacagtgactaacgcttaccgtagagaactgggaccatcacttccgtgtactcaaccagcaacagaaactccacccgcctcagaacacgacaagtttcccgcacaaattgctgcttatcatccagtgagagttgttccatcgtcttgacggccatatcttcgttgaacgaaagttgtttagttgggtcagtgtcggtgacttcagctggcatcaccgaattttgcttaaccggagcggatgccttaccccaggcaaactttgacgaggatcgagagggattggtaactgagggttcaggttgatgcacgggatccgtgctcgaattcttgtgattgtcgatgaaggagaacgtcgcttgcctttcgctgggttttggcactagcgcgactggatggtaataagcactgccgtgtcgatcatattagcccgtgtgacaccaatccccattttggtgctcaactcgtcaatacgcaacataagattccgcaatccgtacaatgcgatgcaggagcctaggaaatctgcggccataagggaaattgtgactgccaacgacgttgcgttgcgcatgcagctggatacgaatagtgcgttaaaaacctccacgtcgaaggcaacaaaagctggttgaaggtcaggtgcgtgctgggttacgtgatacagaagctgcttctccgtcatcttgatcaatggtaaagcgaatgagctcagcacgagttgagctccagtgtattcgccagcggacaagaacgcgtagtaaaataatggatagaccacagcaaggctggtgaccgcgttggcgaatataccgtggcgcttcagctgaagccggattacttggttacgtcgacatccaggacccatgtaagcccacaagcctgaaaggatgagcgagagccacaccaagttgagcgtcaagtacgagaatgggacggggaagccgattgtcaacgctgctacgaactggaatcccgtgtagatggctgcgatcatagcagacatggtgaccagccaaactggtttttcggggattgacgttagcgaggggtggtgcagtggaacgagcacagcgatcgtgaagcaggtcataatgagccaagtgcgagcccaaaacatgccgttagcgcgagggccttcttcgggcggaacaagcggcagtgcgtcggagaccagcgcaatgatcaagcacgggagaggtatggttgcgattaccaggaagttcactgcactcgaggattgttactgctctagaaagtgatgcagcatttgtagtcggtccaacgagtagagccccttgtgttcaacgtgtagagcgtaccatgcacgtttgcacgcactgtatgcgctccgaccaaaatgccagaacatggagtgtgtcgactgactgacgaaagatagtagaatgccctcctgctgcttacgttgttgtctgagtcaacgtcgtcgaacacaccagcaatagacgagttgttgccaacatcctaacgttactttctgaccgggtaaggtaccaatcccgcacaagtccaccagtaacatatcaattggtatgaataagcgaaagcaaataatagacgcctcggggaaaccccaacttgtcgttctgatccgcacaactcggttcgacaacagccactactacgtagtatatctcactctccgcaattagctgacgaatatcatcacgttcgcgctggagttgcctttatttcagaactccaccatccaccagcgtcacaaggcctagccgagtggaaaagtgcccgcagtttatcgcggcgatgtctcccaacgcaatcgcgccatgtagcgatgacactgaggctcttccactgcctcaaccgagcgatcaactccaacaccccgtcgttgctttccttgccaaggcaaaacgtatttggaattcccttcaaatcagccacagcggtggaaagtactccgtcgaacgactactagctctggaagagtacgctcgaaccacttcgctcactcgcgtgctgctggtatgcatcggcacaccgctgcccatggccatcgttataatcctgcaggaatgtgcgccactgcgagacccgtcagagggttggagcgcaaactacggcttttggattcgcgcaggtgttcttggaggtatcgtggctgtcggtatggctgcttttgctctctccatgattccgggggtggtgctgtcaaatctgcagcttgccctgctatgcatcggtacaggggttagctatcccttcgctgcgatgcttgtggccgcattgtgggtattcccgattccgttcatgatcctcacgatcatcagtttgtacgtgacgctgttcgccgggtttttctggctcattgtcgggaaagacgtcataagcgagatggggaagcataccgacgaactcattcttgcagtcagcttcagcggctcacagtgcatgatggcgttcgtctacgcattctacgcggtgcttttcgaccacgctgcaaacacccatttcgaggtgccagtgattctgctgctcccgatcatcaaaatcatcatgaagaatctggtttctcggaccattgtgcacatgaaagacatggcccctgaggccgtcatcttcaccgtggacttcttcaactccatgtaccttgctacgtgtatgcagaacgcgtcctcgatcacgacggtgcttacgatgatggcaatcgacatcacgcagaccattttcgagttacggagcctttactacaagacgagcaccattgtggcacgactagaacaagcgaatggctccattacaggctgcggcagtctgctgccagcggtcgaatcgatttgtcgtgataccacaaagtttgcactgcaagctcgggaaaacgtcattcttgactcgtgtctgcctcacaaattgtccgctgaaggccgaactctgctcgagacattgaagagtgtaccagggaacggagtccgctcgattcctcgattcagtgtagtagagctgcgcgactcgttccggtcaaaactcgataaagcccgcgcccacacatcacccaagtccctttggaaatcccgacgcttgagctcgaaaaaaattgaacccagcagcgccgtcactcaaacaagcgtcaaaccactccgccggggcacaaaagagggcaaaggcgggcttgatatgatcgctacaccgcacaaaaagattcttagtgagaccctggaggtgcttttcactactgaatgcgttgtgttgacagagtacttggaatccatcatccccgtgctgtatgggaacttcgtgctgctggtcgtgcatcttccgagcgcacggtaccacaaggatctggtcgggatcactccagacaatgtggggggcacagtcagcaacatcttcatcctcgccacgctcgagtttgcctcattcattttcctcgtcttcatgatgatgaagaattgccgcctcaaagcgctctaccacctcgcgttcgtcctggagacacagatgcttctcatccaggtgaagctcgtgacctgggtgctcatgagcttcagttttcgcgtggaacacttcggtaagcccgttcatgccttgtttagggtgatcttctaacattgtgctctgttgcaggtgttgatttcaccttcaagtttgcttggatgaaccagggaggctagcctgaagtgcaaagagtagccttggaaagtgtaccaacgtagactcttagtacattttttcaccaagcagccagtgtcttcagtttcagcgaccccatattccaaagcgacgctgagctaacaacgaagaagtggtgataatggacgagctccagagtgtgggcattggtgttgcgcttggcctggtacttgtctccttcttgacgctctatcctggtgggcccttcgactacacagccgacggcacccacactagtgaccattcctcgtcaactcccgcctccaagaatgaacaaggatctccaagcacggcagctacaccagcaatcagctcgggacagccacagaagcagcagcagatcgctgaaatcgagaaggcggcccagcgcgtaaaggtccagaagctgcaggaactgctcggtctggagaaggacaaagctcaggaactcgtgcgacgagccaaacaggaagcgatggacgcggttgaaacgcctggaagagcacccagcagctacactggcagcggcaagagcgcctggctggatcgcgcgttcttcttcgtcatgtttggtctccttgtctgggtgttgtggcaggactacagcatcaacctgttctccgttgcagcacacatgatgccacgcgaagctaacgtggtgcgtcaggtgctcgcagcgccgcgagatcttctgacccagttcttcactctgtgggaataggcgacaacaaacgttagaaccatcagcaataacaaaacatgcatgcatgcaactaaagtctctgtatttgtcgtggtggatggtgttgcgggcatgcgcacacgctattcaggttgtatcaacgtctacagcaggcgcttctcggcagcgcgtgcgtggccctcaagtccttccatccgcgccagtagtgccgagtcctgcacgagtgcctgcgatgcctctgcatcgtcgatgcgcatccacgtgcggatacggaggaacgtgtgaacggagagtccaccagtgtacttggcggtgccgccagtgggaaggacgtggttagggccggcgccgtagtcaccaaaaacctcggccgcgcggccaccaacgaatagtccgccgtagttcgacacctggtcggcaacttcacgcgcgttgctggtaataatctccaggtgctcgggcgccagcacatccgacacgctcacgcacgtggccatgtcggggcacagcaccgcgaagccgttctgagcgctcacgctggcagtcggggccgagcgcagcgtctccagctgcttggtgagctgctcgttgacggcgtcgatgatcttctggctcgtggtgaccaggatcggcaccgcagccgtgtcgtgctccgcctgtgccagcaggtcagcggcgatggtggcggcgtcggcgctctcgtcggcaatgactaggcactcagacgggccagccagcatgtcgatggcgcacttgccgaacacgagggacttggccgccgtgacccacttgttgccggggcccacaatgatgtcgcaggcggggatgccgcccacgccgtaggccatggcagcaatagcctgggcgcctcccgccgcaaggaagtagtccgcgccggacaggtacgccgccgcgagggtagcaggcgccggacgcggggaggccacgaccaccgtcttgacgccggccacgcgcgcggtcacggccgtcatgagcacggaagacggcagcgggtagcggccgccgggggcgtagcaaccagccgcgtgcatgggggacacctacacagcataataaaaacaagttagtcactcataccaatcaccgcagccgagctagcatgctctgcgtacgtcttggcccgcgaagccgccctcgattttctgctcgaagttgccgatggacgcgcgctgcgcctgcgcgaagaccttgatgcgctgcgccgtgcgctgcagcacctgctgctcgttcagcggcagcgcgtcgaacgcggccttgagcgcgtcctggcccacgagcagcggcgcgtcctcgctcggcacgtcgcccaggcgggccgcgtgcttgtgcagcgccggctcaccgttgtcgcgcacgtcgttgacgatggccgtcgcgtcctgcagcgccgccgggtccacggggtcgtacgcgaagctggccacgtcggcgggggcgatctgcttgagcggtgctgcggcggccatggctgtcagagtgatggtctctctgcgggtggaggcgggttgtcaaatggctgaaacggttgaaccgccgtgtttacatccgcggctgactcacggcggaaaaatcgtgtgacgcacaccgcttcaagaatatcagccaatgagatgggaccaccagaatgtttgtgcaattccttcgactaagtacggtctccattcattggtgcagccacttgaagttgaaggtaaagtccgcgccaaagtgcacgacgcggaagcccatggccatgagcatccagagcagcagcttgccctgcacgagcgagcgctgcgtctccagcgcgaaggccacctggtgcagcgcccggaagccgccgcgctggtgcagcagcagcacgagcgccgccatggacaacagctctagtgccgcgtagacgaagatggactgcacgcggcgctgcacgttgtgcacgtcgacgccctcgagctccgagtggaactgggcgttgggcagctgcaccatggccagcatgaacccgccgtacaggaacggcatgacggactcgaggtactcggacaggacgaggcactcggtcgtgaacaggagacgcagcgtctcgcttagaacctctgagagcggctcggacaaggagctcgggggcacgggcatcacagacacggctgggtggatgctggaagtagagctgcaggtggacttgattttggagggaaggctgcggagagctcgggagatgcggacgcgcggtggaacgtccgtgctggccccgctggggatggggagaccgtggctgttgccagggtgctgttggagctggtatagaagcgctctgctggaggcggagagctcgtgtgggagacaggaggccagtcgaatgtacgtgcgcttctgctgcgtgaaggtgtcggttcgctggcacaaggccaatgcgttgtcgagcacgctcttgtgggtcgatgggatccctgtgacttcttgcagacgctctagtacgttgtcagttcgtcgatagaggtcttgcagagctatcgctgtctggatgacgtcgaccgccatgatggttgcaattgtgatggaagaagtcgcactctgcatgctggttgccaggtacacggcgttgaagaaatccacagtgaaaataacagcctcgggtaccaagtcttccattcgggcgattgtgagcgacacgagatttttcattgcgctcttgatcaaaggcagcaacagcaacacggcgagctcgtattcaacgttgtcggatgctgcttggaagagaacttggtagaatggatacacgagcaacagcagcatctgtgctgcgaggaacccaatgaatgtgtaaagctggttgcgttgtgcgagtatttcacggaaaacacgcttgcccgcgacaattcgaaaagatgcaatgagcactgtgaagaatgcggtgctcatcgttattgccatgaacgggattgggaagccgagggatgcagccacagcgatcgcagcaccagtatagttcacggctatgctgacaaacagtgcaagaagctgaaataccgagaaccgtacgccatgcagcaaatgcctcgcttggtctgcagctgcaagagcgacgacgccagcttgaagtgccgtacgaatccatatcccatagtttgcttgccatccgtcgctcgggtcttgcagcggtatcatttcaacgagtagtaccaacactatcatcggcattggggtagtgacacaaacgaacaacacgcgcaagatcgacgcggttcgggtgtactcgttcagcgctatcattctctcgatggagtatttgccacggtggctgatctgcatggcgaaccaggttctcttgagtttaactgcccagggtcgtaaatgttttccggtttctgtggctacgaacgagtagtagcgagttctcacccgatccatctcggtgggcaacgctgtcgacaccattgggatatgtgcagctcggcggcgatttcctttctgacagagtccgccaagacgtgccgcgatttcacgcacaacactcgcttgcacttggctgtactaggggggtatttctggaggacgtgtgtcgatgccaaagtagacgttttgacacaatctggactggtatcgatttagcccacgagacccaagttagccatcgcttgcgttttgggcgcgaatccaatcaaactggaacgtgaagtcgattcctacacagaaaattaagattgtgagctgcagttcctcaacgacagcacaaatcaagggcgtaccgaaatgtacaactcgaaaacctagtgtgatcagcatccagcccattattttgctctggatcgacagcatttgggtttcgagaacaaaggcgaggtggtacagtgctcgtatcccacagcttttcttgacgatgaaagcaaacagcacgaacgatccaagttccagcagcccgtagatgaagactgctcgcaccgtcgagctgacgttgacctctgtgacaccatccagctctgtgtggtatcgcgcgctcgggaggtgcaccatcatgacaacgtagttgctgtacagcagtgggatgatacactcgacgtattctgcgagaacgatgcactcgaccgtgaataatatcgagagcgtctttcggagactggcgatgtgctgaacggatggaatggcagccacaatatttttggtggagccccgcttggtcttcaccaactttgttggaatggtcttggtgggcacgattgggtgaatcattgcgccccattgctgactgaacaacacgcgaaatcgagcaagatcggttgccgcagaggcgatgctctgcactgtcggcatagattgagtgttggatgagcgaggaccgggtttcacggcatagttgtcaagattgttgagagttctcctgcccgctaccgataattggtgtgggaagaacgagtgaacctgtacttgcgtacgctcttccactgtgaattcctcgtgacattgacacagcaagcatgccgcgttgacgaggctatctcccacagtcgcgacatcgattgtctggtgaagctgcttcatgatactcgttgacgagtagtagataccttttagggatatccctgtttctgcgagatcgataatcatgatcaccacgacggcgaaagacgacgatgagctctgcatgcatgtagcgaggtacacggcgttgaagaagtgaacggtgaagatgatgttctcggggattaaatcagcgatgtcggcaaggcaaaatgatacgagattcttgagcaccatcttgacgacagggagcagcagaaatacgggtagctcatacgcagaacctgagaccgacttgaagagcacttgatacgctggatacatcacaaccatcagcacctgaatggagactgctctgtggaaacgctgtagctggtctcgatctgcaagcacgctgcggaaggtcgatggtccaagaatggcgcgcattgagccgaccatcagcaggaggaatgggagcgtcattacgattatcatgtacgggattggaaacacccagagtgaggcaaccatgacagaggcagcggtataagttattgccatgaacacaaactggaaggcgaactggcgcagcgatacgttgatgccttgcagaagatagttgagctgaacagtgattccgtgggaagttattccgcccaagatggcggcccgaatccaaaagccccaattcgctcgccagccatcttccggtctctcaagtggcaatgattcctgcaggatgaccagaataatgagcggcagtggcgtccccagacaaacgagcaccactcgaagcaaagacgttgatcgcgtgtactcctccagtgcgatcaagcgctcgatggaatatttgccgcggtgactcacttgagtcgcaagccaagcccgtttcagtttggagatcccggtacgaaaaacgacgagcggaacgcgcgtgatgctaactcgacttggctcaggcggtccggaagcaaacggcgtcacactcgtgggcatgatgacagagctccagactgagcaactgaggttcggcaagtttgagtggagtgtccaagtatagaggtcggcgacaatgggccttatttctgtttcttatctatattgcgcgttcttgtcgaactttccgaagtcgattgattgaatcgaccgagccaaatcgccagcaaaccgcccgagattttgatttgacttaagtttactatgtacgtaataaagtacgaaataacggttgattccaaaagacttgaaatttgtattcagcgatttcaacccatatggtaaaccgacccgaatcggcaatattggccagaattcacaatacaatacgtgaagtgtgtagtgctcgagaacttgagtgacgctgggatgagaagtcgaagcctctgaaagcaaggcaacacacagtagtatactccgacagctacagtaaggtggtgcgagacgcgagttcaagtcaaggatttcggcggttttgtctccaaattcgaaacatcataccaatagctacttttgagcttgcgcgtcttgagctgaggagtgtgcacagcttgttgcaaacatgtcagtggcgccatcgcctctaccagggcccaattcagggtctctcaacgtgccgaggtttcgttgtccgctctggctatcggagtttcgccgttcattggcacggctgcaagtaagtcactatggctacaagtactctctggagagacttctggcgcttgacgagcactccattttggcgtccactgctggtgtgcattgccacgccactaccaatggtcctggtgatcctttctcaagaatcgctgcccctcgcagtctgcgagtcgcagatcctgaagacgagtggaaagtgcaatacggcttttggattcgttctgctttcctcggtggtgccattggtaatacgtttattgtgcagataaggcatctgttaggcggcttcaccatatcttttcaagatctctgtgtgcgcagcgttgggattcgtcataacgcccatactggttgctgcgtatatcgtatttcctgtccccttcatgacccttgtgataacgggaccttcaatggcagtgttctttttctcattccggataattctcggccgccgagtctgcgctgggattttggctcgccgcaagcagcttcttcgactaatggcatattttacgactctcaccagtttgtgcttcgtttaccccgcttatcaaattattacccatgctgctactggcacgaggtacgagctcccgttgatccttctgctcccagtgatcaagctcgtcgtgcagaatatcatcgcacgcacgattgacaacgtcgatatgatcccttaagcagtcatctttggcgcggatttcttcaacgctacctatttggccacattattgcaaagtacgtcatctagcgcgaccatggtggtgatagtattcatggatttggcgcaggtagtgcggacattggttctactcctccaacaagcagccaagattaacacccagctacttcaagctctagatgggtctgactcggacctattatgggttagctcactctgtcggagaccacaaaacatcggcccgcagctaagcagttttcgacgtcactccagtattaaccacaagctgtctgctgctgattccaaattactggtgaatttaggccaaatccgagaagtgcctataaataaacatggcgtatcaaccgaagcacgagcccacacgcttgtttcttcctcgtcgatcgatcagctggaattaatcgatacagccctcgaagtattctttacgttagagtgcgtcatcttgactgagtacatggaggcaattatcccaatgtcctatggggtatttgtactggtgatggtgcaccttccaagcgctcaataccatatcgatctgtgtagtaggcgcctgggacaggctagttcaagtagacacttcgcagagtcgttacctacggcaatagcaagcatgagagcgtggtgcactctcagcatttgtatactgcatacccaggaggcatactagcaaagacaaactaacagaagccaccgcggcgtcagccgcagtgactccattcaatacagaattcaatttacctccaagcacggattctcaagcaagcaagcaagcaacttagggtcgcgagacactacaaaattaacttaagctgtggacaacgatccaagcacgggcgatgagtcggccccagcagaagcgcagtcgcgcgaacaccgctggagaagatggtgacgctgcgacgcccgctacaaacaagctctggacggcgatggagccgccccagattgtatgcttcttccacgaatgtgacggggtcacacagcacaatgcacagaggaagtgcgtgcggatattactatccaggtgaacagcagttcaccagttcccggcctcaaagggaacggtttgctacaaaggagtaggttataagactgactgtattttggtagaggttaacttggtcgtaatacaaactacaagttaactatacaaaagcccacacaaactcaaatggttggcttgcggagctactggtactatgtaccatgcactcgagagagtgacacccgtcactcttcatgtaatgggcacacttgattgtaccccgttacatcctcccccacttatctgagaatcacatctgattctccaatcagcttcaagagaatccgaacacccaaaggtcagattctcgggcgctgccgccgcaaggctggcgcgcctcatcgtcacgcccacagtgacttgaacccgcagtgggcaccccgcgcggaacccccctgccctcggcgatgttggccgcgaagccgacgcgtttagtggccgtattcacagcgctagcaggcgcagagtgcctcggcacgggatgcatgtgcctccaaacttgcggtgtccctcgtagacaaccagtagttggcgtcgcatggccctcgggccctgctggcacgttcgtgctgcagtgcctcccgcgagggacagcacctttccggtcagcgcgtagcgtaaccatggagagagctgtgctgctcatctccggccacgacagcggcccgacagggccccgctcgtcacagcacggtgtgccggtcggccgaatacgtcggctcgacccatgggctatggtcaagcgctgaccacagccatgaagcatcatgcttcaacgtcgtgtttgcttgagcgaccatggctgcttccatcaacccgctcatcatacagagcaacgcggcggacttgtctaaagccctgcagcgcgtcacggccatcacgtcgccgacgcttaggtgtcttccttcgacaccagggtaccgcaagggtacttaatcgtggtgtggggtgtattgccctccgtcaccggcgatcgcatcctgcgtcgcggcgaccaacaccaggtcggtgtgcgtgcaagaccgcatggcacacagtccatacaggacctcaaagtgtacgagggcaccacctcatacaccaaaggcacgtcgtgtatggcacgtaccacgactgccataagtgcctcgtgcacctcaagtgccacgtgcacaagtagtgtcgcgtgcactaggggtacctcgcgtacaccaagtgccacgcgcacagtgagcgttacgcaccgcgactatctcacaggtagtatgtgccacgtgcacgcgtatggcttcgcgccttacagatgcggcatgtgccgcgccaactgtgaatgtctgcaaaggcaacacgttcgggttctcccctcgtgggcaacacccatgctcgggactgatggctacctggccggcagacgtgccgcacccagagcagcgacagcctggagctttggcgtggtgctgatggctacctggccggtagacgtaccgcgtccagtgttgcaacagcatcgcgctgcggcatggtgttgcgtatgtacacatgccatcgtccgcggaccaagccgcagactggctgccatgtctttgcctgacagaggcagccttccagcagcgaatgcgcgcgccatcttcggcccagcagcgacagtagccgctgccaaggttgctggccatcggtcaccatgaccatgggacctgagcagcgatgcatcaggtccagcaccttcgtgcaatacttcgtgagtggctacaccatgcagccactacactggcttctacgacgaagcaagtctcatgccagagacctcgggaggaagggcacttccgatcccctcccccacttacgatttgagccccggcgggtcaggcgccagccggccgcctaacctcgcgccgccctgcagcaccgtgtcaccgtgccagcagactctggtggcacgggcagctacccttctttggctctgggtcaacatcggcgaccagggcttggcatctaccagcctggatgcagtttgagtctgcgtaacttgacgtgttactctgttacccacgtcttcgggcaatgacacccatgacagcgtacggcttgtcctgcattcagagtagctgcatggcatgcacgcatactcagactcagccatctcggcaccgagtcatggacacttgttgtcccaacgccgcacagtgctaggcgcgacagaccgtaccaacgatccctgctgcgcagcggcctttgccttcagaccgagcatgctcctccacgtggtcattgaggtgtcgccctccggcagacacgttccagtcgtgatcgaccatgctcgccgagtcggcggcgacgcaacatgcatcgccgcagttacgtcgactacccaagccacgtcatctgtgcgcatggccacagctgcgctggtcgacacccagtcgaacgtcatccatgatgaccgggtgccaagcccttggaggaaggaagtacttccgcgcactcctcccccgcttaaaatcaaagcctcgcggcgccttcaagaggaccgtgcggctatgacatcatgacggtgtcacgagcctcttaaactccgtgtggtcatccaccacacgcgaggagaccgaagtgacctgatcactagtcttggtcatactgaccgtgcgtggaactaagttacccacgctgaagtcgcttcgagcgactcctttcggctcatgcggagccttacggcatcgtgtggaactacgttacccacacaggaagtgcagggtgcaccttcctcatccgtttaggtctgtgtgacctggtgtggaactggattacccacacaagaagtgcctgcagcgccttcctcttcagttatggtctgggcgaccgggtgtggtacttggttacccacacaggaagcgcgtgcagcgcgttcctattcagttaaggtctgggcgaccgtccgtggtacttggttacccacgccggaggtgccttgagcggcctcctcagcattacatgctctgtgcggaactaagttacccgctagtcagtggtccttggttacccacctggtggtgtcatcgaacaccacccttgtcaatgctcatgccgagcaatgactctcagcactggagttgcttgttgaggcagctccacatgccaggcataacagccctcggttgcagatacactgcaccttcttcatggagatcagcatgtcaatgatgcctcccttcttcttcttcgtcttgtcggacgcatccagcgcccaggcggtcccatcggacgcccttgtgtctgtccagaggtgggaacatgactcaccaatgctctgtcagacacaaagggccgacttagcctcaaggcgttgtcgcgctactcgaccgggagcctgtgcagcttgcacggcgcactcagcgccaagtcatacttgctcaagccgagggtatatacggttccatgcccaggaccggcttcggcacgatgtccgggacgatgtacggttccatgtccgggaccatgtgcggttccattgctgtcagcgccctcgagcgcggcagccagggtcacagcggaccccaaggttcttcttcggaccagcctcagtcaatgagacctgaccttgtgcttagactctctcgcagagtttcggcacttgtgtcgttattccaactgacatatctggcgacgtgggaacatccacgcgacgtcccagactcaatcatgtctagggataccattacccccgtacactcacgtgtactaccgacaacccaccgttgtccttcaccaatgcgagcgtcagtgctcgcaagggaccccgggtctctgtggtgtacgccttccgtacacccatcacaaagactcgggccaaccccagcaaggccctcgtccttactagtggttgtgtcccccttgagcacctgacggtgcatggcgtcggcgcccccttgaccctctggtcttcgggtaggtcttcttcacagaccctggcgatgggcagacacgttggtagtgtccaaggccgccgcaaccaaagcagcggacagaatactgttcagctgaactcagatccatgggttctggttcgctgtcagcgaccacaggctgtacaacagccagagcaccagcctgcttgtggctgtactcctcctggagggcgacttggatagcctcctccatagtggcggtgcgcacgcggaacaactgcgtgcgcgcaggaccgatcttcaggccgtccacgaagactgtcatcttgacgtcctccgacagtgggttccccaccagcgaggctgccaacgtgcgcatctcctgtacgtacgcgtacagctcgcgctccctttgtttgcaggcaaggaagcgcgagcgctggcggaaatcgttgatcgccgggagaaaaacggctctaagctgctcacacagctgagcccaggatgtgaaacatccaggcgacatcgcttcgcgcgtatacgcccaagtcctggcacgtccgccaagattggatagcgcaaaggcggctcgaaggttctcggccgagatgagacctgcgctcattgcaatctcggtctcccggatccagaagtggagattctcaccttccttcccttcgaacggaggcacagctagccgcagaggcttaggctgcacccgtttgggctcactcatctgagccaacaggtttcattgcacatgagcgatgagcccgcgttcgtactcgtcaaacgcgctcaccagctcgacctgctcggctggcgtcgccgccgccaagctccggagggcatctcttccgaagatgcccgccatcttccgcaccgactcgaactgcgagtcagtcaagtgaggaaactcacttcggtccatcgtggctcacagacctgagccaccgaggattcaggtagaccaatcaacccgcgtaggcgtaagattgactactagtgctaccaagtgtgacggggtcacacagcacaatgcacagaggaagtgcgtgcggatattactatccaggtgaatagcagttcaccagttcccggcctcaaagggaacggtttgctgcaaaggagtaggttataagactgactgtattttggtagaggttaacttggtcgtaatacaaactacaagttaactatacaaaagcccacacaaactcaaatggttggcttgcggagctactggtatcatgtaccatgtactctggagagtgacacccgtcactcttcatgtaatgggtacatttgattgtactccgttacaacgaagctctggtcaagtggatacgtgagcgagaactgtacgaagctgccgtgatctcccggtgccaggagttcggcgaatcgctagcaactgtcatgattccagcggtcaacacgatcaatcgcaggttgctgaagacgttctgtgagctggagttgaagctgccattggagcagatgacgaacgagaagttggtcaacgcgattagtcagatcttgtcgagcatgatgaacgatcagatccccaacgtgcacgccataatgagtcagcacttgaagatggatctgcgccagaaagatgtccaggctcgtgtgctgaattatttcgatcgctttgacgagttggttgaggagtatggattaagtattgctctcgacgggaatgataagttgaagtgcaaactgctgacagaaaatctgcgcccagcgagtctaaaagagcaagtccagctctaccaggacctggatccaactgtggagctcaatgtcccgaggctgtttgacgttatcaaggccgaagccctgaagaaccagtagtcatttgatctgtaccaaacgacaaggataaaagcacgtcgaagcctgctgtgaagacctctttgcagggaagttcgacgatatcgggcgttgagaggccgcgtttcctgcgtgaagatcgacgcgacaccaaggctgcagctcgcaaacgtgatgatgctcctgcccaggggtgcctacactgtaaagggcctcactgggttagtgattgcccgaccgctagtgacgagcagaagaaagcagcccgccgagcgtttatggaacagcgcaagggggttgaagcagcaaaaatgaagcgtgttctcagtgatgagatgaacttgagccgaagcatgttgctttcaatggtgtggtaaccatgctgtatcatccagatagtggaacgaagcccaacatcgtgcctcgatacattgtgaatgaaatcgctcgaaagtgtccgagaatgaaggtgcagtcccttgcgcgacctattgctcgtaaggcagtcggtggtgcaattattcgctgcagagagtttgtccaacttgatctggagctgcttactccggctggaaaggtccgtctgcgcaatgtgacctgcataatcacggaggctgaggaagaagagttcttactcggtacgcagacactgaaagcgttgggcattgatgttgagaaacaactagcagccctagcgaatcgggaagtcgttgatttcgacccgtttgagtcgccgattccgatgagctttgatccacccgacaagatgaatattctcgcgcgtctgtgtgaattaattaacgaggctgtggcaaatggatttccggcggaaaggaagcgggagctttttgaagtagtgacacggtatgatatttggcgtcttgcaattggcaatgacccgccatcgaagatcgagcccttcgagatccgcttcaaggatggaactgtgccaatccgctgccgacctcgcacatacgctccagcagagcgtgaatggatgaagcagtttaatgagtcactcgttgctctgggttgggtgtatcgaaacgaagccagccgctgggccagccctgcacgtccagtcaagaagcctgggatagctggagaactacggcaggctgtggatttccgatgcacaaatgagcggatcctgccactggctggttcgatgccgagcctgagtactcgactgcagcacgccaagaacaaaaagcacaagcagactgttaattttatcaagagcttttggcagatggcccttgcagtggccagccaagaatcacagtcttacatgaccgaagacgggattttcacaccgacgaggctgcagcaaggatcggtggattcttctattcacttctagcaatctgtggagaagatcatgcgtgaggcagacttgttgtacaagagcttactaccctgggtagatgatccgctgatgtacgcagacaccattgacgaatttctttcggtcctcgatcgtgtgtacagcactctggcgaagaatggcctcttccttggcctcgacaaaatctgtctgtacacacagaatgcgaagtggtgtgggcgtgttatcaccccggatggagtgacctatgaccccgcaaagatccaaactctcatcgacatgccacaaccggaaaccgcagcagaattgcagcaatttctctgcgcagccggctggatgaggaactcattggtggattttgcgcgggttgctgcaccactgcacgcgcgtttacaagaagcacttgcgggttcgaagcgcaccaagcgcgctgcggtacggattcccatcaccatgacggacgcggaacgtgactgtttcgctcaagtcaagcatctacttgctaatgcagctacacttgtgataccggatgactctgacgatattttcctgctcacggatgctagtgatctcggttggagtattattctcactgttgtttcgacatgggatcccgcgaagagtgtgacggagcagaaccaccagctcgtgcactgcatgtgtggcaccttcaagggtgcatcacagcactggagcgttaccgaaaaagaggcgttccccataccaaagctgcgactgacctggactacttgctcatccggtccaagggctttcggcttttctcggaccaccgcaacctcatgtttctcttcgcgccgggtgaggagataaaaaaacacgttcgaggtaaactgcagaggcggagtttgaagttaactgagctgcgctatactatcgaacacattactggcgaagacaacgtttgggcggatatggcctctcgttgggctggcgcggcgccaccagcagtaagtacggttatcaagcgatggcaagtagatgatggtgaggaaccattgcagcttcgacatctcggcccggactcggagtggcctaaactacaagacatcgtagaggctcaatgtaacagcaactgcacgcgcccaccgcagctagtcgaaggcgaggatggtggagagatgtgaataatcgcttgtggattccgcccgacgctgatatgctctaggtgcggttgatggtgattgcccactgcggaacaatgggccatcgggggggggggggtgaagataatgatcatccacctccaagaacacttctgcattgagaagctagtgcgtaaagcgcgggatttctgtgctcactgcctgttgtgctgccacgtgaagggtggcaacatcatcccgagaccgtgggcagaaacctaccgcgccaaggaacgaaacgaagcgctgcacatggactatttgttcatcagcgagtacaacgacagcaagtcctacctgttggtgctaaaggacgacttctctcacttttgcgagttgattgagtgttcgaacgcagatgctgcgacggtcgctaaggccatactggattggaatagccgctttggaatgccgaagttgttgatcagtgccaccgcagcacattttaagaaccagctgctggaagaactgtgccacaagacgcaaatgactcagagttttactctagcttactgtccgtggatcaacggcagtattgagcgtcttaatcgtgatattctccaagtactgcgtgtcatgctactggagtacaaggtcgcgcaggagaattgggctgcacttgttcctctgatacaagcgaacctgaatcaccgtccagtggattcgctgtctaaccacgctccagctgaggtgtttgcgggcgcgaaggcaacgacaccactacataaagtgctggtggctactgaggcgatagcagccaatgtccaggaagtgaacgagcttaccccggacatcaaagtggccgtcaaagaattgaaaacgtctctcgaggacatacaccacgacatcgtcaccgccaaagtgaagcaaacggagcgcaacaaaaggaaccagcgacgtgcaattccagtcaatttctatgtcggagactacgttctatggtctcgtgtcgactcgaagacacatgtgaacaagatggcggtcaaatggattgggccatagcgtataattgatgccaacgtcaactcatttgagatcgagcacctgttgaccggtgcaaccaggacagtccatgcatcgcgtctcaaacgatacgcggacagcagccttcatgtcaacgagtaaatattggaacatgttgcgaatcaagatgtctatctaactgtggagacatttaagcaacaccgcaagcatccaacccattcctatgaaatacaggtagggtgggagggactcgaggacattgaagattcctgggaacccgtgtgaggatgtcccggtcaagttgcagacatacgtggataatgcgaacgatgacaagttgcgtcagttcgtactcaacctgacctcacatccgaagggagcgacacgtgccaagccgacattgaaagcgacgcgttctttccgtcgcaacaagcacactaatgtgacgaggcgatgcggtgttttctcccagaaagcagatataggccctccttgacagacctcaggctactagagctttgggtccgtctcggctggcacagggtgtgtgttgtccagtacacgctgttggtcaggcgcacgatgtgtatcccttgggtagcggttcttttcaccaggaggttagtatcgaccccgtgaatcagacagctacgccgggctaacgctagaacaatccaacccaaatagagttatatacgttatacaatcacacaaatacttctttgccctctcttctttctctaggcccaaggctaaggccaaaatacaagtcaactggtccaaatccaagacacttgatcaatcttggggacgcgcaccacctctcggagagaggaaacgatctaccctgtcgccaacttcttcagttcgacacaggcccaatagaccgcaaatatacaacaaagacggtctgcaatccgccaaatatacagatatggaatagatatgatcacttccaggccgaagcagtggatcacttacctaaagtactttgaattttgtcgtggagaacggccttccaggctgtgaaagaagcacttgtgcccttcgaagcaaaacgaactctgtttggttaaaggtcacatgcagacgaaatctttcctaagcgacccttcggagactgcgacctttctgcggagtgttggtctggccttgaagggtcgccaaactggataccttctcggagttgttgggtacacctaggatcttggaagatgtcatagtgaaaccaagtgttcttgggtttggagcctcggaacgcctcaagccgaggtcgttcttggaattttgtgggaggtaagtctgggaacgcgaagtctgggaatcgatattccaggaaaacaacggggaatctgagaagtgcctcagctcccaggttgtaagccagagtcgagttccgccgtacttagatatactggggaggatcgctcgcattccgttgcacttcatagaacgggatcaactcgcccacattgatctatcttccgggattcagcgtccattcgcagacattacccttgtttttataggagactccaaatcatccagtatcaccaagctccacatcattgggacttcccaggttcaggtgcatcgacccgaatttagggatcgacaccgcgtcacactaacaccagcgccacccaactgaagccaacggcaccaaaacgctactgccgcacaaagaccaagatcaaggccaaggtcacgaccagcgactagcaaagccacaagctgcagcattgggggctcgagggcgaagttctgcttggagggcggtgtagtaggcgcctgggactggctagttcaagcagacatcgttacctacggcaagagcaagcatgagagcgtggtgcactctcagcatttgtatattgcatactcaggaggcatactagcaaagagaaactaacagaaaccaccgcggcgtcagccgcactgattccattcaatacagaattcaatttacctccaagcacggatccccaagcaagcaaacaacttagggtcgcgagacactacaatctggcaggcattaccgaagataacgtgaactctacagtcgacaagctcatcctctacgcgatgctgacgattgtgtcattcattgtgcttcttgtcggaatgaatcacagttgtagagtaagggtgcccatcaccttgcattcgtcttggaggcacatatgatgctcattcagaccaagatgatagtatggatgctgatggccatgagctttcgagtagaccacttcggtacgtttcgtgcccagctgaagtcgtacaataagcctaatagcctgctctgcacgtgtcgactttacctttcgatttgaatggttagctgaacaccttgtcagcttgtcaggaactgtccgtgccgtccgaacatctcaatccaatatctcctgaaactagtattcataaacctgcggtggagaccgaagtgtttggtcgtagtgcctccatttgctgtgaatgtggaggagtcggggaacgtcggagatcttgccgatgcgctaaaaaaaacttgcagcatactcgcaaactgtaggattcagctagctgacagcgcagggtggcttccgctcgactcgcccagggtgcacgagctgacgatggaggatttcgaaaatgtactcctttgccaatccaagttggcagcagtgtaaggcaaaacagactgaagtaactgaagtaacatccatatttcgaaaaatatttttgaaaaatagcatttagagcaatgcaaatttagtccagggcaaagcccaaaccgatggccggtagcagtctctctccggcggcacccgcacgcgagtgctcgacccgcacaggtaagggcgggactggatgctagtagccgactgcaacggcatcccgcccacgactgctcgcagcatcgtcgagcgtggagctgccggcatcaagaagagaggcggcgcacgggcggcatgcacgaaatgcactccagaaatggaggaagcccttgtcgcttatctcgaagacaactgtcagtacaccctcgtgcagatgcaagagatgctcgagttcgacttcggtggtcacatcagcacttcccttatcagtaagaagctatgtgataagctttacactgttaaacaggtacatgcttacagtcgggtttcattactatgttttgatctatgcgctgtactaagtatgtatgtaattgtgctaggttcgtgttgagcctgaaacgtgtaacaacgaagtgaacatcgcgaagagaagggagctcggcgaagcgctgctgcgtcatgagcgtactgggtctttcgtcgtatattatgacgaggctaataacaatctgtactgcaagcgtacgcaaggccgcaccccaatcggccagcgcgccgtcgttaagctccctccctctaaaggcgctaacttgcaggtgcagtgcgcgatctcgcctgaagtcgggctcgcatactacgttacacgtcgtggtagcatcaagatggaggtcaacgcagcgtttgtggacgcggtgtacgacgcgggcaaagcccacgacgtataccgcgacgactttgttggcaagaccattgtcatcgtcttggacaacgcccccgcccactgtcggacggaggacctggtccaagacagagaggacttgaagctgttacgtcttggcccatactcgccgatgtgtaacccaattgagggtacgatgatcaacgtgccctacggtgagaaggcagagcgtcgcgtgcaactgctagaaaaagccgccgagcattgcatgccctgtatcgacatgcgcctcgtcaacaaaatggcacgccactgcgcgctatctgtcgcggccgctattcgaagtgaacccatggaatacgggacgtagatttagctctgaactaaatccatgtcggtctacacaaaatttcgacttttcgattttgctaaaaaaataaaattcctacttacgggacactctcctttgccttacactactgccaacttggattggcaaaggtgtagaccttcttacgtgccttcatcccaaagagatgatctggaatgtgctaggacgcgttggcccggacgatccttttgttcacatccttgttaccagttccttcacggcttcggaagacaggccaatccaacttacagtcgacgatggtgtttgattctgggcttgggatgcggttcctttcgtttaagatggcaaccacagactcgatcgaagtcttgcaggatcggattgcgactgaatgtgttgcaatatggtgccacccacccctgaaacaggcttcacgtctgggtgaacaacaatccgtaagctgaggaagcgaagtcagaagcaggagttaagcaagagcgagcaacagcgttgctctggagatgaattttcttagagtgaagaggcgtcctcgctgatagttcagaaaccaccggagggcctgctagttatagaacttcgtaaatatgcaaataggcacggtctgtcttggtagtcgctggctcttgatcgtttgtccgggaatctgagagcaactggtgacacgacctcgcttgaaagagacttacatcaggctggattcactgaattgaagccatatagtaggctgtacctccgcgagctcaatctcctatttcctgtgattcatcgacgcttggtgttcacgtagtcgttttgatcctctgggattcagaccattgagctgccgtaggtactccttaatgagtccaggaaccgatgggagattcgcaacaggttcccaagtaatatcgtcattagcgcccacccaactcgtcaagaccgtgtttgtctaatcgatgctccaggatctcttcaatcaggtgtccttcggacccatcctttagtcggacagtaggtactgcattcatacgagatggcgacttgtctttccgaaacagcttcaaattcatggtgtggaaaacaggataaagtgtgacttgaggcggaagattcagacgatacgatatacctccatgttgtacttcaacaacttcgtacggaccgatccgtttcggggctagtttccgcttgagcgcacctgcattttccacactcaagttttttgtcgatacaagtaccatatctccaagttgaaaagtttggtcacggcgtcccttatcatagtgcaatttcatcttttgtgctgcctcccgaactttagcctggagaccacgtagaatttcctccatgtacagcaggaaggacacggatgggtcacgcgagttcgttggccgaggaacgtcgttatgtactggcatcggcgggttataacccaaatcagcaaagaacggcgtcatctgaatactggattggtagtgccggttgtaggcgaattcagcaagagccaagtagtctccccaattgttcgtatagccgctcacgtagctccgaaggtacgcggccaatacggcattgatacgctccacttgaccgtcagttctctgctggtaggctgctgacattcgcagtttcgtccctgttaggcgagcacactcctgctaagattttgaggtgaacttcgtgtctcgatctgaggttatatcacgagggatcccatgatagcgaacgtagtgattcacaaacacaccagcgaactcctccgctgaaatggacgtgtttgtttcgatgaagtgcgccctcttggtcaatcgatctgctattaccagcactgcgtcatttcccgcttcattttccggaaggtcagtgacgaaatccataccaatagattcccaccttgctgtaggcacctccaacggacgtaagtagcccggagtttttccagtccttcctttacttcgctggcaggcctggcacgtcttaatatactgcgtaattcgacgaaccatgttcttccagtaaaacctctcctgcactacatgcacagttttctcgatcccaggatgcccactaagaacactatcacggagttcccaaagtacaccattttgcacttcgatactgttggaaggaatccatatgcgagacgctccgctcaagtcgtagtaaacgatatcatctacttcagaatagcgatagcgttttgcatgagctattggaagcttcttcttgtgcattaagctctctcgcaccactttctgagttacctgggctctacgaacttgcaccattaacgacaacacagggacctttttggcagcgtacaactgcttgttcttcagcgctagaaaatcaacttcaaagtcacttcgtctacttagagcatcatcaaagtaggtggccaccgtgtcccctaaatctttgaaaatcccggtgacgatgcgattaaacgtagcgggagcattgctaagccccatggggacagcaatatattcgaagaggccgtctgcaaaggtatatcccgttcccgcatacgtttctggtagtagcccgaaaacaagtcgaaacaactataccagcggcatcctgccatgcgatccaagatatcatcctttctcggcataggtgtagactgtcgtatggtacgctcgttcatggctcgatagtcatggactatacgccaacccacaggttttctgacaaaaagtgggagcgccgtggggtgagatgctcggccgaattagacatgctgctagcatctcctttagccacacgcgtagcgtctcagtttgttccgggctcaaacgccactggggacggaaaattgcaccctcaccaggcgttagctccatttcatgttcaccatgtgcaggtggcccttttggtaagtgcgctcggaatatttcttcaaatttcttgatcaaagggaacgccggattcgacctaaaactctcttgatctgttgttgcatgacgctccgtttttttcgcgcgtcttggtttctaccgaattgaattgttggtgctgagcgatctggtcaagatataccgccagaaagtcacctcctttactccacgtagcgtgaatcgcattaatcgtggcctggggaagaacaaccataaattcaaaggcttttttcttgacaagtcgtctagcttgtttaatcgaaatgtaccgggtcttcccgtgtactttgctaaagtgaaattgcttttcactctggccgcgtaaaatcggcatcttggtttgctgttgcgtacgacggttcttgatctttaaaacaggagatcggagttcaatatcctgttctcgcagcgccgccttgtaagatggttttttccgtgcttcaacacgagcccaacgaagtgatcggtgtcgtacactcggtcgatcgcctagtcaataatcggctgcatcttcctcttccacggaacccccatcatcaaatcgcacccattcggaatcaggcaaacattgaattcaaagtcaaaagaagacatctcatcaacgaaaatacttaaagagatagtgcgattcgggatggactccgtctttccatttccaaacgtgacctcgaaggtccctttgtcgaccacaaagtcgatcagctcattcttccgcaagaactcctcactaacgccacagaaatcggcgccctcatcaaaaaaggccgatccacgagtcagcagctcgccattgcacacgcaaccaacctccttgatcaagttgcgactccaatccgtagcgacttgggtattctccacgaagtacttcgcattgttggtttttcccgggtcaaagacccacgagtccaaattgtcattggcttcgtcaggtcctaggatgccatccgtaggaccggttagtttaaattggctttgatttttgacagatcagtctgaatagcggtgagcacttcccacagcttagtgtcggtcgtagaaggcagttggattggcggtgcaggcgcggccatgctattgtaccctgctttctccctgtttagaagccactgcggcttcaaatcggggtgtaatgcccagcacgtgtcggctgtatggccggtttcaagacaccgagtagaagaacaccgctgactgttgcgagtgcgcggtttctgctgaggaggtgccgctactggtttctttgctggcttggcgttgatccttgccggtccagtatcagcgtctttggggttaaggccccgagctccatctagaagatcgtccaaagagtcgaactcacgaacttggagaagctcacgcagcttagtcgatttgagtcctttcttgaacaaaaccatcttgtactgctcagagacatcatctgtgttaccaaggcgtacaaattcctccatgtacacgtccagagatctcgttccctgcttacagtcaaagaagctagccacaagctcttcttccttggccttggtgacgaagcgattatgcatacctttgacgatagctgtccaggtcttggtgcctttgaagccacaaagataccaggtttttgccttgccacgtgtgtggttcatcatcaactgggccacgcgaagatcgacttgcggatttttgaaatagagcccgtacgctgcgtaccaagagatcatattaagcgcgaaaacttcgatgtcgtccgaatcctcaccactgtaagcgggtgtctctttctgtttgaggcacttctcgattcgggtttccagttctgctgttgtgaattccttaagggcgtcgtctggagcaggtcccgtgacgtcccacttagggtacaagtcttcggaggggaaaactagagtcccaggctgaattttgttcacggtgtcctttaaagtgttgatgttctcgactgctaggctgatttcgcttctcatctcggccgcttgagttgcaatcatgctgatccgcgtttccagagtgctcagtcatgtatgcatttgctgggatgccgcttgggtctgcgtgacgagcttttggagtagtagctggttgtccttcaagatctgggcacttgctaggtgtttttcgtcgctcttcaacgcgtactcggacatccccttcgtgatcccgactttgtcgacacttagtttttgtagctgtgcttgaattccttgatggtcggccagaatcgcgcgaagagagaccacttcttcagctgttaaagcctgcacaagctcggttggacatggactttcctccatgttactgtcgctcatttttgccgtagctccttgacgaaggctactatgttgcaatatggtgccacccacccctgaaacaggcttcacgtctgggtgaacaacaatccgtaagctgaggaagcgaagtcggaagcaggagttaagcaagagcgagcaacagcgttgctctggagatgaattttcttagagtgaagaggcgtcctcactgatagttcagaaaccaccggagggcctgctagttatagaacttcgtaactatgcaaataggcacggtctgtcttggtagtcgctggctcttgatcgtttgtccgggaatccgtgagcaactggtgacagaatggctctaaactctccaggtcgatgcctcaacgcaacggctttttctcgccaagaaggacggtagatggttggctgaaggcgagccagaagaagaagatctggagatggaaattcccgatctggacgagattcaagaagtgtatggacagcatctcgatcccacgcagacgctaggaagcgcattgcgtggaattgatccactacacatccacattttggtggcggagacggacttggtgcaaatgtgcaagtaccaccgaagaggggcacaaaccttaatcacaatcgaggatagagtggagcacaaacacacaatgccgtatcgagaatgtgccgaagtgctgagaaattctgaccacgtgaatgaactggtggatgcaatccatcgagctcaagatacgaagtacgggactccgttcatatccttggaagggtcgagaggaaccggcaaaacccaaatgccttcaacttgatggcgcgtgatgacttggacgtgttttacattgtttttgagaggacgactcctttcgaatggcaccagcccgtgtatcgcgactccattggtcggtctgcagcattccgttgttgtgtgaagaaggacctcgcgtacgttcgcagccctgaaattgctgacatcatatcgaggcaaatgctccattcctacggattcatctacgcgttgttgatggacaagaaggcgacgtacggagtgcgtgcacgctcagacgtttactatgcaatcccagcacgtcgggaaaaacgcagacgcccggttgtattctttctggacgaggttccgttcttagcagaccccaagaacgacacctcgacgcagtatattctcttcatgcggaatgtgctccggtccttcgacctcacagtcataatgagctctcgaaatgggccggggagggacgtggtttcgacagaagtggagtcgctggagcgtgacgcgccactccgttgcatcgtgttcccgctgtcccaacaaagtgaagatccatccattgaagcggcgttgaaagtgctggtgaagcacagtcgggctctgtccgcgaaggcgatggtgaactatgtcaatcgccgccgttggtccagtagcgttagtctagccgactatatggacaagatggtggaagcactggcgcgtcaatttccagcttacaaaaacccttggggtttccatgtcggccagctttgtctctttcttccagcgaggcatatccaggatgaaaaatgtctcctggttcacaaccactttgtgtgtctgtcggaagaagagccgttcaatctacgctacgtatcgtgtgagctgcagccttccagtcaagatcgcggctttggcagaggatcgacggacaattcgcgcgcaagacttgtgaaagatgattcagcggcttggactaacgttagcagctcagtgtttccgaaggttgagaaagacgtgctgctgtatctctgcgcgatgggtggcaagttggtccacccattcgaggctgctccgtatccgctggtatcatttcgccaagcattccaaagtgtactggaagacgccaagtcagtgttaagccccatattatgttcgagtagcagtgcataactggagtctctggtgattggagcgacggtgttggcgagtcacaggggcggatttgctggggttcagtttgagaactttttgttgagcttactctttgagcttggcgtccgggattcccacgtcccgtgcaaatacgaatcgtttccgcgcccggacctgacaattccgtatcttgccatgcccgatacaaactggccaagttttctgcttgaaatgccactaaaccttggccatgcagtaagggacagccaggggatgatcatcatcagccccaacgtatcggtcgaagagaaacttacaggagaaaggatcaagtacatcttggagggggtccctacgaacagcaaggtgcacctcgtggtttcaagctccgaggtgagtacgaacgaggttcctgctgagcagatagagagactggcgtcgctgcaccatgttcactactacgccatcagaaggtcggacgaccaggacggtggcttggggtgattgaccagccttttgctgcaacgagcgaggaagccgatatgcctgaggaaaagatgatcgtctttctgcagtctgtaggccgacagagatgaagtagcgggttgttcagaacggcaacgtcacctaagctaggacatcaactatctaactggcaatctgcgcgccaaatgcggagttctatttgcatcgttgcctaggaagcttgatctccgtctacgcagtgctcaatgccctctcttgtgataagaaaaccgtggatttccctcattgattgctcttggttatggcgtcgtcttcatctagtagcatcggcccacacggaagcagctccagtggtcatgcaactggattcaaggtgtacggcagtgtgttcaaagtgagctcccggtaccagttcctcaatccgctaggcaaaggctcgtacggcatagtttggtacgtagcacggcttgacttcctggttggaattgacagcgatcactaaatcctttgttcagtgccgcaaaagaccgcgaaacagggcaatgcgtggccatcaagaaagtgagccccatggccaaacgcacagtagatgccaagcacacacttcgcgaggttttgctgctgcagctcctcggcaagcacccgaatgtacgattgtcgcggtcttgtgtgtcgggtgaaatacttgagagagaactaaaacaagctatccccttgtatcgccaggttatatcgatccacaatttgtcgaccaatctgaaagacgacgagctgtacatcgtaatggacctcatggacacggacatgcaccgcgtgatccaaagctcgcagcctctttccgacgctcatgccaaatatttcctccaccagcttctgcgtggagtcaagtatcttcacgacaacggcgtgctgcaccgagacctgaagccgggaaacctgctcctgagcaagacatgtcagctcaaaatcgccgactttggtcttgcccggaagattcctcgtgtcttggggtcctccggcacccttgagcgccctcgatctgcacccgcagctagctcaggctcatcgtcaagcagaatcttggaacgaccacccatgactgaacacgtcgtaactcgctggtatcgagctcctgaactgatgctgcagcctgatggactgtacgaccagagcgtggatatgtggtctgtcgggtgcatcttcgctgagatcctgggtcgcaaggcgttgttccctggcaaaaactttctgcatcaactcaccctcatttttgatgtcatcggagctcccccgcctgaggccacgacgcgaattcagagttctcaagctcagcggttcttacgatcactaggcaggaagccgaaggtgccattccgtacactgttcccgaacgcgtgtgacgccgctgtggacttactcgaccgcctactggagtttgacccagccaaacggatatctgcgcaagaagcgcttgaccacccgtacatgcaggacatcgagcgtaagtaccgacatcgcagcggaggggtggaccccccgccgtccatgcgcgcggacttctcctttgacttgaagaacttgagcaagatggacctgcgtgcgctcattgtaaaggaggtggacaaccaccgcaagtccgtcacgtctcggggtagctctgcacacgccgatagcagctcttcaggagacagtagtgatacccccgaccaccgtccagcagttgagaaaactcgctctggattgacccccaacgcgacatcaagctccacaccgacggcaaatatcggcagctctggcactcgactcagcaaacttcatacgaacatacgtcaagcccaagcacaaagtcaccagcacaatgaagcagctcaacagggacaacctcaagccgccacatttggatcgaatcgccagcgtatacgagccgttagtaagccacctgtcccgaaacagcaagaaactggcatcgcggtctcgaatcagcacgaacacgttcgcgtcgtggcagctcaagcctctctactgtcagatagtttgacgtcaagagtatctccaccaccggaggaagaagagtgcaagccgccagctcgatctcgagacctcaagcccccacttgtcagctctgtgccaggggagtcctccacgatggtgaacagcccaacaacagcacttgaagaattgaagtcgcgaactactcgaacgagtttgtcctatcaaaccgcccacggtcacatacacacaacaacacggaaaccagagtcgacgccaggaccaaaggctacagaaaacgccgacgcatctgcaacggatgcgatcgcgacagccatcgccctaagtcagcgctcaaaagctctcatcgcgtctctctccgtgtccgcgaagacgccagacccagtgagcgcctcacgaggcatctccacctcgacgtccttcaatcactcgcaggcgtggcaaaccaagcaaagcaggaaccccgagtcgtccctctcgtcttcttcttcatcttctgcatcgtctcctgcctccccaccaaggagcgacacgtccgatagtcacaagtgcagtggcgtctcgcgctcgaaccgtccggggtcagccatgctgctgactaaaagcaagaaactaaagccggtggaccaagtttcagcaccgaatgcagcggggaggccgcgtcgagtgtcttcagccggccctgtccgttcgaagcctcgaccgttgacggccaatggctccctcacagccaggaactccgggaccagcaacaccttcgtgggctccatcaactcgctcatccgagcgcaacggtccaacacgggccagtctctagcagagactgctaacgacatgctggccggaatgagccgcaatgagcagcaccaagagtcttccgattcgagggaggaaggggttcacctcaagcctcagcgctcgtcggcgcagcttcacggcgcagacgccactggtaagaaacacccagccaagaagctcacagtgccaagaagccccaagttctccgtcatgtcgtggcaaaagaagagggaggggagcgctagagtaggaagctacgcgaccggcataccccattaatactaagccgtgctaaagcacggagaagctctggactttgtcatgtagttttgattctaggtttgattctaagttaatttatcttaaatgtgcctacccgaggttccttggttagagcgaagtatccttaaatttcagcagttggtgcttttgtctttattcgggtttgctaccaagttccgaaaccatgaaagcatgcactgccaactatctcaagcccttacgcgagcatgtactggtcactcgctatgacttagctatcttgcaataatatgcagacaacgtcaaggcttgaatgcggcggtaacggtacgtatgcacgtgcagaatggttgaaacgagaccagcatcgtttgaagacttcaacgacacccacgactttaaattgaagtcgtgggtgtacgtgggtgtcgttccatgacttgaacgtggcgacaccgatgtaacatcgttgaacatacatgtactgcaaacacaactgtagttatgtttggagtcatggtcgagcgacatccgatcgatcgtgtcacgcgaatgtcgaccctaaaagactcaagcaacacgccgctggataatatattatccaagcgtttattaaagttaacgggtacgttccgatacgttaatgatccgttcgtttataaccgatagcggagcatatatttttatagtgatttgcacctatcgccctaacaactcgggataaaatcccgctcatcatgacaccatcgtcgtcaaaccctctgtccactttcagcaggggcttccagaacctgaagcccttgaagacgctgtcgtccccaccggctgcaatgccacgcgacgtatcttcagcttcagcacacacggtcagccgaagttgacaaggagcactaggccgctgagcatttcggatcagttcgccaagggcgaacgcagtgggattcagcagagtggtgcggactctttgccgtcccggactgggcgacggcgtttaacgaagtgcagcgaccagctttagagttaaccgcacaggaagttgcatgaagttcatacggcttgctcgctcgcgcgctcgtacaatgccttgtcgtgcagcctctcttcacagctcagacgctgctagcttttgcaccacggcgagcgtgttagcgtcggtggagacggccgctcttcatgctcgaaaagtgggctccgccggctgcaacaggagcaaaaagtttagtatctgggacttgaccaactgcacgatgtacgcgcgcgatgcagcacggagaaaatcttcttttggccgggcacctggaggctgcagctccggcttgctcaaggtggccattgcttgcggatgacgaaactcttcggttctacgaaattctcggcttgaaggaggcctgcttggtccctggcaagttgtcaactaaaagaccgtttgcagaggcggtcaggagaacggtgatgacaagatcgggtgctgcggacgccagccgtggacactgggtgagctggtggacctggtgatctgaatcgggggcatcatcccttagaagacgaccggcgccattgagaagtaacgttagagtgagtcgtccaggccctttcaatactggtgtggatatgtcagtgttgctggccggagcgatttcgcgtgaatagcttctagcttacaaatctccacgtagacaccacacacgggactgcagggtccgcaggcaacgtggtctagcagaaagggcccacgtcagccgtggatgagtgtaagattgtaccacagataatagtttccaccccagcgtaagagaacgctgctgagcttaacacgctgtggcttgcacacgtggtcacaagaccgccagcgccgccctcattcgacccgcagctcccgtcgacgtggccaagaccgcgagcgctgtcgaccaaggatggagtccatccgatgggcgaccgaccatcgtccatgctgataccgtagaatgcctttcgaaaaatatagtggacactggcgcccctacagagccacgttgtgtgcgctattaaccacgctccgccatgccgcactttgattcgctgcagacacgtgatcttataccgtagaggtccttgtgaggcggacgccacggttcaaacatatcagccgatccgactccgattggccgatcgcgccttgagaaaaattagaacgttagtgcggccgccgtgattggcgacgagcgcgtggcgatctgcttgcgggcaccggcagcgcgtccggcaaggaggacggcggacgtgttggtgcggtgctgaagctgctagcagcaatagcaagcaattcttgggtgcggcgaattgcttggggcttgaagggcttcgcttaggcaccgcttcaacttgtgcgtaacacatcggaggaatgcaaaaagatccggccacggatactgaagcgcaggtggcgcatgttggccattacagacaacgacttacaaagccggcagacgaagtcaagcaaagcttaacataagcaaaccagccaatcagattcaatcaaatgacttcatctttgtataccatctggttttgtgtactttatatgctttcttgtgtactttatgcaacacgccgtgtgttttatgacagtttcacagatttgacgggagggaatttatcgttgcttttatataggaggatggcattaagcatgccggctttgtaagtcgttgtctgtactatttcacatccgctcttgttctgcccaaaaggcgtatgtaaagtagaatgatgttcagacgtctccaggatgttgtagctctgcatgtcgcgcctgccttctcgacaaattatgtaggccgatgctgtgtacatctagcctgggagtgatatgtcgtttgtaagagcgcgctgagctcgaagcagcagttgtagaacaaaatgtaacacgtagatgtatgtggagtgtggcagacgatgctacacgcttcaacgaaatcaaggggcctagtccatgacttcgccctgtaaaaattgcatcttgttgctggatcgatcgaagatatatatccccagaaaaattgagcctcggctaggtttcgccgcgagaagaagacgccttctacgtgcaggtaagaacgacttaatgtctcgcttaagaaccgacttgcagtcaagtgctgccgaccgcaatgacggaagacgtgttccgaagtaaaataccgaagcaatctcccataggttgaccaagttcatgctacaaactccaaagcatacgtatcccgcaccttagtcgtccagcttggtactctgctaatccccgcctgtgattggccggcgcgattcgcgataacgcttcaaacggactgaacggaccagttgggatttcgcttcgaggtgaccaaggcgaacaaaacacacgaacacttgcccgcctacatgacgctcgtccgaaaccggtatcgcgtggtgcagcgcctggcgcagacgacctacggcggtatctacctgtgcaccgacgagctgctgcggcggcgcgtcgcgctcaagagcgtgtcgctcttgcacgccatcaacatgctggacctgcgcaagccggagacgcaggcgcccgacgacccgcgccaggagaaggccttctcggcgctgcagcgcgcgcagccggacgcgcacccgcacgtcgtgcagtacctggacgacttcgtggagggccagacgctctacttcgtgctcgagtactgcgccggcggcgacctcttctcgagcgtcaaccgcggccagaaccgccgcctccaaggcgtcgacgcgctcgccgtcgtgcagcaggtggcggccggagtggcctacctgcacagtctcggcgtggcgcaccgtgacttgagtctcgagaacgtcatgctcagccgcggcgtgtgcaagatctgcgacttcgggctgtccgcgcgggctgaccagctcagcgtgggacgcgtgggcaaggcctactacatggcgcccgaagtagtggtaccgagctccgcgtacgaccccaagggggccgacgtctggtcgctcggcatcatcctgttcatcctcgtgacgggctcgccgctcgtgccgctggccacacgcgaggacgcggcgttccgcgccttcgaggcggtgggcgtgcgcgaggtgctggcggcctggaggatgccgcacgtgctggacgagcgcgcgctgcagctgctggagggcatgctgcagtgcgacccgaacgaacgtctgactattgaagaggtgctgcaccacgaggcgttcgtacggacagcggccgcggcatgaagacacgagatttagcaaacgatatttcacggagtagcgtgctcgaacgcaccaagcgcgcgcaccgggcttaagtatataattttttaaaactaaatcttaaacaagtgcgtgcactgtcaccaccttggctcgttaaacggagagggccggagagctcctcgcagcctccgagcgcgtgagacacaggcaaggcagcgccacccgttgcccgggcgtcccacgcttcagaggtacgctttctcatccaaatttcccgaacggtaaggcaaatggccagtcctggcgtccagctgcgcgtggtctcctggcgcgacgacggcgcactgcgccgggcgccagctgcctggagagagcaggtcccgcccaagttgggctccaacagcagtgagccctgccttgcgcagcaggaaggaagcgggcacaccagaggtggacgccgttgcatttgtgtccaagcctagaggactgtctcgagactcgaagtcggcggtgatccgtgtcagcctttgaccgcgcgtgttatgcgtagcgtgaggctgaagtttgttgcgcggcattgtagagctgatacctagagggcgcgaacagcatcttcagacaggcaaacggctttaagcttggacgtcgatccgccgcgttgcaagatgtcgggctgcacgaggctgaacgctatcgactcaaccttattcctacgcagcctcatcacagtctgccaactccttccgcggatgtcctccgtgaactcgagtacagtgtagcgcgcgacaaatcagccgtgccatatatcggcagagccgataagattggctcgcttcaacttgatgcctgcgggaactcaatcggtacaactcaagtgcacgtagtcactaaacactaaaaggggatgctattcccgccgcagcacctaggcttgcagtcttatggacacttcttgtgaattagcgcggcaccatgctctgcgtactctgccttggacatccacatctcgtggaacgagcctagtgacgccaagatggagccgcccaggaacgaccccacgcggcgctcctgagcatgggccgctaccaccttaacgcgtaaactactcgtaaacccgccggccgcgcctgaattccccgacgccgtaagcggcagcggcgtaccgctcaacgtcgtgaccacctcgcgctcaatgcgcgtgggcatgttctcgaagcacgagctgcctcctgtgagcacaatgttctggaacagctccttgcgcagctcggtctcggtcgtgagtcctccagtctcacaaatcaactcgggcagtctcatgcccggtccgtcgctcacagcaccagcgctctcggtactcgccgtagcgggcaccgtctcccccaggaaatagtgctctgcgacgctaaaccgctccgtgcccatggccaccaccgtcttgtcgggcagctcgtagttgatcagcggcagctgggcgttctgcacctcgtcgaagggtccgtccgccactcggcacagtccgctctccttggcttccaccacgtacgaccagctctgtttcttcctcctggccacctcctgctccagcgacgtggcctccgccctctgctcccagctcttggccacctgcggggccagcttctgcctcaagaaggcgtccaggtcgtggccgccgaacagcgtcacctggctcttagggtacgcgaaggcgtagccctcgtgcaccgaggtcacgctcgtgtacgtggcgcccatctcgaccaccaggccgctcgtgcgtccgttggcgtagcaggcgagcacggcgctcttggcgcagaagagcgcgggcacgcccagctcctccatgaccacctccaccatctgctcgcgcgcgcgcaggtcgcgcttcttgccgctcggcgtctgcgccacggtcttgtgcttgtcggcggcatccgcgtcctccgccgccttgtccgcgtcctcggggtcctccggcagcgcgaacggccgctccacgagcagcagcgggtgctcgctgagccgcgtctgcaggcgcgagctggcggcgtcgaacagccactgcgccagcttctccgggtcgctctcggtctgcgcggcgcggcggttcagcttcagcgcggcctcggcgtcgtcctgcacctccgcgtgcggcagcgggcgctcgaacacgcgcgggaagtcctcgcccgcgtagccgaacttgcagcgcgacgtgccgaactcgaacaccagcgcgtccaggtcgttggcctccgcggcggcgctcgaggaggccgcgccatggtgctcgccctcgtgggctcctccgcctgcgtacatggtttgagtggtggcgtttggagtggcgcacataattaaatgcatagcgtgacgtacactaagttatagattggactgcaacttgaagacgaatcgggagggcatgtatgttcattggagaagaacggtaaattgattatactgcgcccaccaagtcatttacgatatgaatcgtgcacacctgcgcttcattcctactttttttccctctagaagtgcttattattacttgttggatcagtgagcgggggtacactcgcgtagcgttgtgtgatgtggtattcagatgctaaaattacctaaagtactggcccgcacagaatgtgatgcatgggtagagcagagttggcaaaagaagacgagtagcacatgaatcataagttacgatactcggaggacgaatcccgcatttcaggtggctgcactacgcacgtgggatcggatcggacttcacgttataccgtggaaaatcaagaccactttttcacgagcatttcgaccgccatgccaaccccccacgccacacccgtagatactaccgataaaaacgaagaagaagagagccgtcgtctgctaggaaactcaacgctctcttcatcgttcatctataactctcactactccgatgactcgagctccgacgtgaagcaactacttgaagaactcgcgcacgacatgatcggccgcaattctccattcaccaccccgttcggtacgaaagctcaagtgtacgcggactacacagccagcggcaaatcgctcgaaggcatcgagaggttcattcacaaccaggtcatgcggacctacggcaacacgcacaccaccacctccgcgacgggactgcagaccacctcgttccgggaagaagcgcgcgagatcatcgccaacgccgtcaacgcccgtcgtcagacgtcgtgatcttcacgggtcagggctgcaccagcgccatcaacaaacttgtcgccgtgttaggtatcaacaaaggacgtcgccgacatcgcagcagcaaacgccccgtgattttcacgtgtcccttctcgcaccattcgaacctcttgccgtggcgcgagagtctgtgcgcggacgaggtgccgatccctgaggctgttggtggaggtctcgacctgacggagctggagaggcaactacagcgccataaaaaccgcccactcaagatcggctctttcgctgcagcgtccaatttgactggtttgttactcgacgtcgatgaggtctcctagctgttgcacaagtacgacgcgttggcgtgctgggactacgccacatgtgctccctacgtcgacatcgacatgaaccccaagtattctgccgcctacaaggacgcggtcttcttttccggtcacaagttcgtgggtggtccgggttcgcctggtcaagaagaagttgatgcagaatgaagtaccagcaatgcctggtggaggcactgttctcttcgtcacggcgacagcgcagcgctatctctacaacacggtggagcgcgaggaagccggcactcccgacattttgggcagcatccgccttggtctcgccttccagctgaagcaacgtattggtccgcataacatcatggagattgaacgaaggcatgtacgccgtgtacgagagtctttcagccgcaacaagaatattgtggtgctcgggcgccagggagatgacgtgaatcaattgccgattttctcgctgctcattcacttcgggaaccgcttcctgcaccatgtgcgctgctgaacgacctcttcggtgtccaagctcgtggcgggtgtcaatgtgtgggtccgtacggcgctcgagtgttggggctcacccagcagaatatgttaggcttggagcacgcgttgctggccaatgtgaatattctcaagcctggcgacacgcgcatcagcttcccgtacttcgcggatgaagacgaagttaagtatattctggacgctgtacactttgtagccgaccatggatgggagttcctaccgcagtatgcgttcgacgtccgcaatggcgtctggcgtcacagttcaagagccaaagttgagttcgtgagcaagaaactgcggtcggcacttaaggacgagggtccctcggagatcgtcgagcgtattgaagacatcccagctcaccggcgagagaaccttgagcaggccgtgaagctgggggtcacgatgaatgctgcttcgtcgggcctcccgctgaacgagaaaatccccaggatgtacgaggctttgcgctggttcgtatacccgagtgaagccgtcgcggttttcagggaacttggtgctaagccaccactttcggacaagatcgtcggcccttgccagccacaacgatacatggagcctactaccaacccccagccagacagcggtcgaagcaagaagaaatcaaagcgccatcgagtgaagatggtgcttttaggtggtagctgtgtgtcgtcctgccccacaaaggaatagccaaggattgctagatactacgtcgaagtacaatatattcaacgtgatttaaagtagtggttgtcataggcctctgcatcattcccttgtattcatgctgagaatgttgcatatgacttcagactttggctgcttggacgcttcatctttcccttcttttcgtacttcgccattccttcgtacaatagtttgatcaggcccttgtggaagaggccccaccgaccgaggagtttgcgctcgagaagccagtccttaagctcggcttctttcttgacgtgatagcagatcgcagtcggttggagagggtcgaagtcctctggcttgaggcacttgaaccctgaattgcgagcgtacacgtcgtcccagaacacgtaccagaacgtgatctgcgggtgcaggaacacccacttctgtcgcagataaagcgcatccaacgccgccttgcgagtcctcggcagcgtctgcagcgctgggttcgcctcatggtcaagtaagtactgctcgaggtcattacgccgaagacgcgcgttattatacacgaagatccagaaatcgtcgctcagcgccgcactctcctcctcttggatcatggcgaggcgcaggcggtagtcgcgatgcttagcgtgcagctctttcaggccttcctgccagtgctcgcgcgtgttctcaaagattttgtgatgaatgtcgctctcctccatggacggcttgaggccgatgtgatcgaccttcatcacagccttgcggcaaccgtgaacttggaacttcttgtcagtgtcggggatttccacctcgcctttgccatctttgtacttgatggtgacgtggaagccgtccgccatttcgcgcttggtgtcacctcgactcttaaacaagtccttgagcagctgaggaagtgcccagccattttcctcgttgttttcattgccgactgcactacgttgctgttaaccacctttagcgtccaccgctttaaatctttgagccctctgcgagtgaattgccgctccacccaccgcttgaatactttcatggccccactcttgtttacccgcagcaacacaccagatttgtcgctgctggtctgaacgcgaataatgccgtaagtgtacttgcactcgaatttgtagtacccaggcttggaaaaaatggggatgatccgccacttccatcccagaaacttgggtccgacgaacgtcttctctgtccgagtgaacggtagcataatgggggtttgccgctcacttagcactcgcaacttctgccgcagcactcgctttgccatgatcgacggcgtgaaattcaggaacaaaagcttggcgaggttcgtgtcacttgtctgaatggagtttccatcgcactcgtccgtgataattgcttcgtcttgggcgtcatcgtacaccacaacacactggaaagggtaaggcaccacgtacatcttcccgaagcaacttacggagtccaaatggccgtctcgagcgcctagggggttattccagaatacatcgacaccttcaagagcctcgcgagccaaccgtctcagctgagctgtgtacatgtgctccttgccgtaccagtgcgacttgacgcggtccagacctgaggcgacaacggcttcttcaagtgagaccaagcgtgcagtccccgtgactttcgttgagtgtttgctcttggcattggcttttcctttgactttctccatttcatccccttcgtctttgacggccaagtcaagaagcactgctcgccagaaagcttgccgtacgcggtgtttggcttccttttggaggttccaatgcggaatgacggtgtgtgctcgagcgtcgaccagcccacggcacgtatcactgaacgatagccacccaaggatgcatttaatgtaaacgcgagcgccttgcacacccagcagcagcactgagagcatcaccagcaggttaaatccgtgaactacaactacaaaccccatgaagccgctgatcccgtgggttgtcgttgacgactccaccttctcccgagaagcgtatgccaccacggtggctcctactgcagttgtgagagctgttagcttggagataagctccatccagtcatcgaacgggtcgatgaacggctgactgtacttcgagagccccactaccaagaagtaaaaaaagctgatgagagtgcccaccgatttgaaccgattgacccgcagacacgacgatcaccgccatcaagatcttggccaccatctgcatcaccttgtatgtgctccagttgcgctcaaagcccgcgtaaagggatcggtacgggcagccaagttggctcggatcactgggcaccagttccgtgtacaccttgtcgtcaaacttgaccttctctccgtcgagatcgtacgtcacgtcttcgtcttccagcgatccacttggtctgttcttccagatcgaccactcgagcaggaacgggagggataacgtgaaggtgaagaggagcaggatggcttcgagtgggaagaagaaccagtagggtccgcctcggtactgcgaggcaaagtgaaccgatctcattgcttcagagtcggccgggttgtgtgtcacgacgagcacattgaaggacatttgcgtcagcggcaggtacacggtcaagcaaatggtgatgaaaatggtcggaaacttggtcgtccaagcgttttgggacgcaaatgtcgcccacgtcgtggcttcatggccgtggcgaaccttatccgctgtgcgaggcatcgtccaccacaggcggaagaccacggccaagaagctccagtgaacgagaaggatgccgctcaatagcagcgccacactcaccttggaccacaagtttggatccaggtccagataatgcatcaactgcgagatgtccttcaccaaccagttgtagacgctgcgcatccaggtaagcccgacgtagatccagctcggaatctcttgctccctcaaaacttccaacacgggctcgtacagacccgcgaagaacagacctgcgatctggaagaaatcgcggacgatctcgatccgcaacagaggcggcagagcaaaggtggtggccgtgacacaactagcccccgctaatatcacttgcccctctttccacatcacttgtcgcccctcgcgaatcatttgcaatgcgtcgtccaccgtttggcgactcagagctaacgtcctctgcagtccttcaagcttgtcttgggcgatttttttcaacgacctcctttactttaatagggttgacgagttcattgccggcgtcgtcgtcgtcggagtcttggtcctcgacaacctgaattctggacaaacgcaacgatcctgccgtgaccttcttctcagcaagctggtgccaacagttaagcgcagcttcatcggctgcttcggcaatattctccctgttgaccgattgtgtggatcaacgaccagaacaccaacaattcgtgggcttgagatgcctctaaggatgccagggtacaagctgcaatagctgcttggagctccgccagctgcatctccgacgcgccgtgggagatcgttggtacggtctgtcgcggatagcactgtgcggcgttgggataacaagtgtccatgactcggtgccgagatggctgagtctgagtatgcgtacatgccatgcagctactctgaatgcaggacaaactactcgctgtcatgggtgtcatagcccgaagacgtgggtaacagagtaacacgtcaagtcacgcaggctcaaactgcatccaggctggtagatgccaagccctggtcgacgatgttgacccagagccaaggaagggtagctgcccgtgccaccgtagtctgctggcacagtgactcggtgctgcagggcggcgcgaggttagacggccggctgccgcctgacccgccggggctcaaatcgtaagtgggggaggggatcggaagtgcccttcctcaccgaggtctctggcatgagacttgcttcgtcgtagaagccagtgtagtgcagccactcacgaagtattgcacgaaggtgctggacctgatgcatcgctgctcaagtcccatggtcatgatgaccaatggccagcaaccttggcagtggctacttttgctgctgggccgaagatggcacgcgcactcgctgctggaaggctgcctcggtcaggcaaggacatggcagccagtctgtggcttggtccgcggacgatggcatgtgtacatgcgcaacaccataccgcagcgtgatgctgttgctacactggacgcggtacgtctaccggccaggtagccatcagcaccaagccaaagctccaggctgttgctacgctgggtgcggcacgtctgccggccaggtagccatcagtcccgagcatgggtgttgcccacgaggggagaacccgaacgtgttgcctttgcagacattcacagttggcgcggcacatgccgcatctgtaaggcgcgaagccatacgcgtgcacgtggcacatactacctgtgagatagtcgcggtgcgtgacgctcactgtgcgcgtggcacttgatgtacgcgaggtacccctagtgcacgcgacactacttgtgcacgtggcacttgaggtgcacgaggcacttatggcagtcgtggtacgtgccatacacgacgtgcctttggtgtatgaggtggtgccctcgtacaccttgaggtcctgtatggactgtgtgccatgcggtcttgcacgcacaccgacctggtgttggtcgccgcgacgcaggatgcgatcgccggtgacggagggcaatacaccccacaccacgatgaagtacccttgcggtaccctggtgtcgaaggaagacacctaagcgtcggcgacgtgatggccgtgacgcgctgcagggctttagacaagtccgccgcgttgctctgtatgatgagcgggttgctggaagcagccatggtcgctcaagcaaacacgacgttgaagcatcatgcttcatggctgtggtcagcgcttgaccatagcccatgggtcgagccgacgtattcggccgacagacactccgcgccgtgcgagcagggccctgtcgggccgctgtcgtggccggagatgagcagcacagctctctccatggttacgctacgcgctgaccggaaaggtgctgtccctcgcgggaggcactgcagcacgaacgtgccagcggggcccgagggccatgcgacgccaactactggttgtctacgagggacaccgcaagtttggaggcacatgcatcccgtgccgaggcactctgcgcctgctagcgctgtgaatacggccactaaacgcgtcggcttcgcggccaacatcgccgagggcaggggggttccgcgcggggtgcccgctgcgggcacaagtcactgtgggcgtgacgatgaggcgcgccagccttgcggcggcagcgcccgagaatctgacctttgggtgttcggattctcttgaagctgattggagaatcagatgtgattctcagataagtgggggaggatgtaacggggtacaatcaagtgtgcccattacatgaagagtgacgggtgtcactctctcgagtgcatggtacatagtaccagtagctccgcaagccaaccatttgagtttgtgtgggcttttgcatagttaacttgtagtttgtattacgaccaagttaacctctacttcctctgtgcattgtgctgtgtgaccccgtcacacgtatgcatccttcatggcgctcgctgcaaagctaaagccctacctccctgtcgatgagaagcaatcgcgtaaccggactggattcaagcttcaaatgcgcctgcgttggcttattggtggatcctatcatgatattcgctagtccggtgttggcgcgcttgcgcgcactcgttgtcgcgccccacgaggtgtcccgcgcgcgcttgccgttctgcttcgccatctcggcaaggtttcccttttgagcaaaattgtgttttgttgttttttaaccgaaatattaggatatggcacaaaatggcacatttcgtttctaaccacttttgtgccatcgtgccatccagccaagacaaagtgccattgcatggcacgccatggcagtggttaagaacgaccctcagaaagacgtgatccccttctggaacctgaaaaaaaaggccaaacatcgcgtatggcaggccttttggcgcgcgatgctgctcactgagaagcttgaaagttcaaccgaggagcccgaccacgacgtcaagcaagtggacgatgaaaaagtgcggaacgtccggcgactcgctgccctcgaggaagcggtggttgcgtctggaatcgactgcatcaaatctcattggaccggtcgagagcacatgtacacggcgcagctacgacaactggcgtgtgacgcccttgaaggggtcgacgtgttctggaacaacccgcagggcgctcgcgatggtcaattggactcggtctcgtgcttcgggaagatgtacgtggtgccgtacccgttccactgcgttgtggtctacgacgacgcaaacgatgaagcgattgtccgggacgagtgtgatgaagctacacccctgacaagccacacgaacctcgccaagttgttgtccatcaacttcacgcctgaggttatggcaaaacgcgagctgaggcagaagctgcgagtgctgagtcatagcaaaacgccctttacgcttccctttacgcgccaagagaaattattcgtgggtcggaagtttcgagggcttaagtgggggatcgttcctacctttaccttcccggggtactacaagtttaagtgcaagtacacgaaaggcgtcattcgtgtgcgatctagcagcgatccgagagggatttcgtcacttctgtctaaacttttcatggtgaagaaggccaagatgtggggctcggtactcgccaagtcgaaaatcgtggtatggctgaggattctgctacggaaagcggctcaaagcgaaagtgtacaaaatatcaaggcgaaaattctgatgaaacttgacggcgagcagcaacagcaaggatcccaattcaaatacgatagtgcaaagcgcgtcatggctgatggtttcaaagggttactattaaataccgcgacggtgagattgcaccgaaatccgacgacgatttcgaggacgatctgccacagcaagtaagggatcacatcgccaaaatgacgcgcagagctatcatgaaggcggatcacattggattgaagccctcaatggaggaaagcgagactttaacgcgtattttcgcgcagactcgacacatctgggagaacggttcaagtctatcgacgggggcttgctcaagcccacaccagcagaacgcgaccctgagcgacgacttctggctgcacgtgtacaacaacccacacttgtcgtacaaaaggctgaagcgctacctgcgtctgaaggagtcgaacccgctgcttcagaaactcccggagacgcacacactagcgttggattcgctgtacgctcgacagaagtgggcgttccgagatccacgcaccacgtgctggttcgtcttttgggacgacgtctacgcctgcaactcggatatgaagctcgacccaatggactttgacgcgcttgacccaacgagtatctgctaccgcgagccaatggagcgacaagagctggaggagtggctgcgtcagcgcaaattgctacacaaatggagaaaattcaacccggcactgctcgacttgctctacgagaaaaagagggactgctctaagtaaaataaaacggttaaattttattgctgttatggggtcttgtccatctcgatgtataaaagatcgagtaaacgagggtggaatagcctcctcgtcttgagtagttttcgttcccgcagccaggcctcgagttcaggtcgtcgtttgacgtggtagcagatcgcagttctctctcgagggtcaaagtcgtctttgagcttgcgaagacacttcatctctccattgcgagcgtacacgtcgtcccagaagacgaaccagaaggtgacagccggatgagactgaatgaacctcatccggagataaagcgcgtccaacgcgctttggtgcgtatcaaccagcgacttgagctgagggttcccctctcgacgctttaaatggtcttccaactcgtgccgagcgaggtgcgggttgttgtacacaaagtaccaaaacgcatcgctcagcgtcgcgtttgcctccaaatgtttgcgctcaagcgctcgacgatactcttgatgttcagcattaagctgcactaggcctggctcccaaaccccgcgcgtttgatcgaaaatggtcagcagttgttcgctctcctccatcgctggcgttagtccaatgtgctcgggtcccatatctgccacgcggttctggaggtggtgaactttgcccgtgtgaggcgcaacggcgtctccgtagccgtctcggtacgtcatattcacctcaaacccttccgccatgatcctcctgttggcgtcccccttggtagcaacgtggatgacgccgcaggtgtagtggcacgtgaacgtcacggtcgaatagcgcgtctccgtgcgcgcattaccctccgaatcggtcctggttactgtgccgtcttcgaccgtcgcttgttcttgccgtgcaaatgggaagtggatgctggtcgcttggctgctcaatactcgcagcttctgtcgtagagtgcgtttggctatgatcttcggcgtaaagttgagaagcaagagcttggctagcttggactgctggtgaggctcagcgtcgtcacgcacgatcgcttcatccttcgagtcgtcgtacaccatgacgcagtggaaggggtacggcagcacgtacatcttcccgaagcacgacttggagtcaagatgcccgtcacgagccccactggcgtcgtcccagaagacatccaccccctccaatgctgctcgcgtcgcctgtcggaccttagaagtgtacgcgttctcctctccgcgccaatgtaagcgtacgcggtgcactcccgacgccaccaccgcctgctccagagcttccaatctatgagcaacggtgagttcgtcggcatccgctttcgagttactactattctgcgccatctcaagcagtagcgacctccagaacgcctgccatacgcgatgcttcgcctctttgtcgacgtcccaaaggggcagcacgttcttcgccggcgcgtcttgcagtcctcgagacgtgtcactgaacgtgatccagcccagcaagttcttcaagaagagtcgagcacctcgcatgccgagcagtaacaccgctagcatcacgaacaggttgacgatgtgcacaatactgacaaccacagcaaccagttcaagcgttcgtgacttggtttgctgcatatcgacgaatgctgctaacgctccaccgacgcatgtagtcaaagcggcaatcttaccgctgatctccatgacgttgttgagtggatcactgaagggcgtgccataactcgagatggccacgactgcagcgtagatgacacacgatagaatgccgcggatgcgagcgtctgcactggcggccagtacgataacgagcgccaacgccagcttcaccagcagctgcagtactttgtagtagctccagcgctgctcgaatccggcgtacagggatcgatatggacatcgaagctgactcgggtcgcgggttaccagacgcgcgtagactttatcgtcgaaaggcacgacttcaccgtctaagtcgtgggtaagaagcggattttcaagcgatccagtgggtcgattttcagcgatagcacgcaccagaagccacggcagcggaatggtgaaggtcagcaggagaatgatcgctgcagcgacaatcgctggccatgcgctgtcgtgacggaagcgtaagagcactaaatccgaggcactcgtagctttgctgctgtcttccgaggtggatcgattcgtagctgctgcaacgacaacatccaggcaaagtcgagtgagcggcaggtaaatggtaagacacgcagtgataacgaacgtgaagatcttgactcgcatcttctgcttggtcgcgagagcggcccacgtcgtggcttcgtggccttgacgcacttcgtccgctcgacggtgtagatggcgaccggagaaggcgaaccacagatagctcacgtacacaacgccaatgactccaaccagcactgccaatgcgatgtcagcgatgagtgcctggttctgcgaggcttcttccactaatgccaacacgttgatggccatcacttcgtacgcgcctcgtagtccactgagaaacttgtttaaagcgctaacgacgtggtgtttctcgaagaagtcgagcaccgacacgtacagccccgtgaagaagagccccacggtctggaaaaagtctcgcgcgatctcgacgcgcaacagcgggggaagccccgatcgagccaaacaggctgcgactgcaccaaacgcagccgcgccaccgtctcgaactgcgtctaacgcggcgtcaacagcttctcgactcagacctaaagcgccatcaagaccagcaaagccctgagccgcgattgccttagcgaaaggcgagtcgaacacctcgctagccatcaactttactccgtccacggcttgacccgatagtttttctgctgcttcacctactgccctccattctgtagtaagcgactgcgagcaacgagaccgtagttctgcccactcttttgctggtaaaacatctcggatggtgcctatttgtcgacggagttcctcgttgagatgttctgctaccggtgttcctgcttctgcaaggtggtggacagcatctcgaagctcttggctgacggaagacgctagaattgttgacgaagcgagagcggtcgtgagtagcttgccaattgcgatggcattatccgtgacgtcttccactgcttccaagacttccggggcagctttcgtcacctgagccgctagtaccgccgcttcttccgtgatgacattgctgacggactcgtgaaccaccgaccaaagcgacagcaactccaccgcaggcgcggaagctaaggttacagtcgcacacgcagccatcgcttctcgcagctccgccaactgcttcaccgctagcggaccaatctgcgcctttgcgccgtctgccagaactccggtgctcttgatttcctccacgaaccgcagcgcgagcgcttcacctgaactcgccatgtgctccaacgcagccctgcattccgacgaaacgttagttgagctcagcacatcgagaagtgcacgaccagctcgttggacggcgttttgaagttcttttgggtcgacagcaacagtgtttgggatgtcggaggtaatcgacaacacttgggctggcagttcgccgtcacccaccggcagtggcaccacggaagccatggcgtctcgccctgctgatgaaccaagtgcttgttgaagtgaaggtttggtccgttgtacccagtagtcgtatagtgctgctaatttggtctgcacttctcaaaatgttagggtagtttcgaagacagatttaaatgatacgcgtggctgtgcactcgtttgcagaactatgtatgtacagtacgtagtatgcactaagcagaatatatatttcctccagctagcggagttttcgagggatgtttggaatcaacttttggggttaatcatggaggcgatcatggagccgcgcttgaacgacttgcctcggggcatgaccttcatgttgtgcttggggtccgaggcttcctcgagcttcttgagctcgtcgtacagcagctgcagcagaccggggtggaacatgcccgccttgctcagtagtccgcgctcacccagccacgcctccaggtctgcgcggttcttcttgctgtagcagatggacgtggcgctgttggggtcaaagtcggctctgcacgcacgtcctggcttcggttcccccttcggaatcagtcgggacatctcgctgttgcgggcgaacacgtcgtcccagaagatgtaccagagcttgtgggccggactcgtcatgatgaaccgctggcgcagatacagcgcgtccagagccttctcatgcgtccttgggagcttacggagctgctggttcgtctcgcgagtcatcaggtactgctccagatccttgcgagaaaggtactggttgttgtacacgaagtaccagaagtcgtcgctgaggatgtcgttggcctccgcgtggatcttgatgaggctgcgacggtactctcggtgctccgccctcatcttgttgataccggcctcccagctcggtcgagtctgctcgaagatctgcttcaggtgctcgttctcctccatgtcggggttcagtccgaagtggtccgagtctcgaacagccttgcgtccggtgatttcgtagcgcttaccggttctcggagccttggcgtaccctcggccgtccttgtaggtcatcgtcaagatgaatccatccgccatggggcgcttcgccgcgcctttgataactgtgtcgccagacgtcttcaccttgaacacgccgtacgtgtagtggcacgtgaactcgaccacggccttgtacctgaccttcatgggcttgaagccctcgatgggggtccactcgtagtagtccgtgaccaccgccttctcaacgcgagagaaggggaaccgcacgggggtcttcaggtcggcgagcgctcgaatcttctgtcggacttcgcgtttggccactatagctggagaaaagttgaggaacaggagcttggccaggttgctgtggagtttgctgtccctgggggcgctctcgtcgatctcgtcccaaattatggcctcgtcgttggtgttgtcgtacacgatgacgcagtggaaggggtacggcaccacgtacatctttccgaagcaggacatggagtcgaggtggccgtcgcgcacgccaatctcttcgttccagtacacatcaaccccctccagcgctgtcctcactacctggcgtaggcgggtggtatatcgctgctgcttaccgcgccagtgcgagcttactcgacggatgccggcggagatcacagcttgatcttgagcgatgagtctagcagctgccggtgattccttcacgtgggtttcagagccttcatggtcgggatgaacaggagtcagatcatacagaactgctcgccagaacgcctgccacactcggtgcttagcctctttgttcaggtcccagaatggaataatatgcacagcgcgcgcgtcgtcgatcatgcgggtcgtatcgctgaacgagagccatcccagccagttcttgatcaaggttctagtgttagccactccgagcagcgtcaccgtcagcatgatccacaagttgaggaaatgcacgataagaacaaagcccaggaagccttggatgtagttagagtggatgtcgttcctctgcgcccaagctccgagtgtacctccaactgccgttactagcgcagtgaacttggcactcgactccatcaggtcgttcacagggtcgataaacgggcggctgcagctggtaaggagcacaaccaggaagtagacgccgcagacgataatgcctccagtcgatatgttgcgcgaagatccaacgaccactgcagcgagtacggctttcgcaactagctgcatgaccttgtacgtgctccaacgctgctcaaagccattatacagcgagcggtaggggcaacgcagctggctcgggtcactggccacgaggcgtgcgtacaccttgtcatcaaacggcacctcttctccgtccaagtcatacgtcaccttggcgttttctaacgagcctcgaggccgattagcacgaatcgaagacaccagcacgaacggcaacgggatcgagaaggtgaaaagcaacaagattgcctcggtgacgatgagcccccagtacggcttgttggtgaagtgcgacgctacggtaccttcaatattttctgtctcgtcgcccttgtgggcattgatatccagcaccgagaagcagaactgcgtcagcgggagataggccgtcaagctggcagtgatcatgagagatgaaaccatgaccatgcgcttgttcgtggctgccagcgatgcccaagtgatggactcgtgtccgtggcggacgttatcagccccgcgcggcatgtagcggatgacccggtacagccacaggaggaaaaaaaaatgaatcacgatgacaacgccgatagaaatgaagacgcccgcgttgctgaactttgagatccactgcacgaatgccgatacgtcgatagcgatgatggtgtacgctgcgcgcagacctcgaaccagttgcatgatgtactcaggcaagtgttgatgctggaagtactccagcgttggcttgaacatacccgacaagaagagcccagccgtctggaagaaatcacgaccgatctcgaatcgcagtagaggaatgttcacaagcgccaagcatccgcccacaagagctgcacgaccctcgcgcatggcttgcagcgtggctgccagccgctggcgactgatcaacaaggagccttgtagtcctgccatagcttgcgttagtgctacatgtgcaatctgctcgtcgaacaggctgttgtccacgtcaaccttctcaactccttctcggtcgacacctgccatggttagcagcgtccccttccgctctgcagcctggacgatgtcgtacggctccaggacagcggtcttctctccagcctcgtcacttattccatcactgacagccgtgtggatgatcgaccacaaagccagcaactcaggtacagcagtccacgccagtcttccagtgcagcacgccgcgacagcaactcgtagctcggcaaggtcttcctcggatgctctcagactttgctccgcgttctcgtttgcacaggtcatgagcactccagcactctcgagctccttcacaaactccatactgaacacttcgccgtcgtccatcatgcgctcaatcgcggtgtagcattcaagtgaaataccagcagccccttgacttgggagcacagcgagcagcgcagctcctgctctcttgatcgcgttctgaatctcctcggggtaatgctcgtcgacgtggtcgatttcattcgtgacgggcggctcggagtggtgctctacaaccgtctcgctctcgtttccgttgtcattgtcattggcgaccgagggctcgttatcgggcgcttcaccttcgtcttgatcatcaccacccacgtcgagcgtaagctctaccatctcttcaattgcggctgcttccttggccagttccccgtgcagaccgtcctccagctcctccttctgcgactccgatgcatggtgcgtagttgcttcgtgcgggctctcgtggatcctaacatccgaatcggcagccccgtcgtcatcgacctcattaccgctatcgttgctgccgctgtcgtccacagtgatctcagcgtgtgggatgtaaggatcctcaacggcattcgcagctggcgctggagcttcgtggcgtaccgttgagatcaaccggtcaaatagactggtcgatgcaggctcgggggcgtttgagctgtttccgcccacgattccagctgtgctgccggtgatggacgctctgttgcctgcttcacgactctcagtgcctgaaccagaaccggagtcaggctggtctgtgcgcatagcagacaataaacgcccaaatagccgggacgaactgggtggggggctcgctgcagcctttggttgttcaggtggcgggctagagaccggtttgacatcttcctcttcttgcggtggtacagtgacacttgcagcatcagctccactgttggtctcagagttactggaggtttcccgtgtggcagccacctcagccacctccgcagtgctagatttgctttcagagtgagccccagagccaccttgtccaagatcctcttcggcggaagactccttttcactctccgcagtctcggctgttggtgcatcaacttcgctactggcagtctcgctgggtgccggtcccatgctatccgtctccttctccgtctctggactggtgggctcgccagtcttctcatccatgggctcactcgtggttggtgcttcagtttcgacgtgggtggcagcagcagcagtgacagcctcagtcactgacgcgtctgaccgctccttcccgtcgtccttcacagcttggggcgacttcgcgctgcttgaaaagaggcctctggtaaagctcggccgcttggtcttcgaagcttcaggcgtcgtctcgttgcgcatcgccgacatgagccgtccaaagaaatccggcgaccgcggagacgtcgcagcaggcttgctcgctacgggctcaggaggcggcatcacgatgacacgaggtggtggcgaagctgggtcgccatggtccgagccattgacatcctgttccttctcctcctcgtcctcctgcttcgcctcagtttcgctctccgccttcaccgccgcctcaaccctctcctcctcctcctcctcttctttttccccggcgacaacgacagcagcagcatcttccgtcacttcagcgtcatcttcaccgttagcggcgtcgtcgacctctccaagcttatcactctcagcctcagcacttggtgggggtacaccttctccgctgtcagcagcttcggcgcttgcttcttcttcctcctcctcctcctcctctgcaactgcagcaacttggtccgtcgccagagcgtcttcagccccagcagcagcgatatccgcggcagcaactgcttcagtcgcagccccgacactctcgtcgtcgtgcttgagctcctgcacggcctgcagcacgcggtcgaagaagctggatgagcctcggcgctggccgggcggcgccatcgtcgtcgctgctcactgcgtcttgccgtcgaaagtcgaaatggccccaagccgccgcgtgggtttcgctttcgcttcggtcgaggggtccattcattgccgccaacgtccgttacgggggtcccatgcaacgcgcaacacctcccgcgggtttcgagctcgctgcggtgactgagccggggtgagggcacactgcgcgggtgccacgctcgcaggccgagtcgcagcaggagaacatcggagtcccatgcccacttgacggagtagtattatagtagtagtagtagtagtaaatatagcataatatagtttctattatactatcagagattgatagtagatattaacagtagtagaattatttaaatattatcggtaaaataatattagtctactatagtaatagtagaattttcctcggctaattatattctattatagtagatagtagttgtgttttcggctaataatagtgtgtttagacgctggattcgccgcctccgacaaacttgccgccatcattgacaccggaaacccagccagcctcgccaccagctgtcccctcgtccacgctgccgccgatggcagcaccaagatcggtgtcctcagccactccggacgcatttggagtcctcctcgagattcgtcaccaccgtcaggaccgcggccgtcatgacgtgtgggaactttctcatcaacttgatgtgccctacgtggtcttggatagtggtgaagcagcggctttcagtcacgtttgcctgctgtgtgctcaaaagctcgcttgccacccacacgcaagccccaacgcgtgggaaggtgccttgcaccgctggcagcacacatccaacgtgagggcgcacatggtgccgcatcatggcgattgtccacaagatagacatcgaagaagttggagtcctctattcgccatcttgatgaagctatcactcttctgaagagcgtgctgttggaggacaacaataaaacgatgtgtcgcatgcagctccagaacaaaagcatcaacgaggacgcctggtggccgacatggaggataccttggtggtcgacatggaagacatcttgtggtcgacagtagtaatctaaattactatagtaatattattctagtattcgggattgctagattggataaatcagaatagtataattgaattggccctgtcatttcttctatagtaatgtaggaagcaaatcgcattactgtcaatccctgaccatatactatcatataatataatgtgaaaatcgattactttcaattataatcggagaataaatcgttcatcggtctcgtaattatgtgcagcctagcaatttcgatcaacatgcctgtaccttggcccgagactcgccaagtgcagcggcaacaccgcgtcgcctggatatctcagttacatgtattacatgtatagcgtgcggcttttcctgcttagttttgatgttagtgttgtagccttgactacctagccaagagcgactgcagcgattgttgtctggcggctgatttagcctacaaggagcgaatgccggttgcacatcgggcattccgtctgaatagcaagcaaatcggccggctctggcttaatcggccgattagcaaatgtaaatccgactcatatgctctgactctgtaagtcgtcctaggtaataatcttgagtataaatcgaggtacccaatctaattaagatgtcggatttatcaaatcggggatcggcggtcttattaagccactaaatcggcggaataacaatccattaagacattctaatcgcttttcgcaataatgcaatagttgtgtataattgtgccttttagagaggcaaaacagtggcttaacctaatagttatgcaagcccactcaacacgaaaggtgtactaatgaaaaagtagttcgaggcgctattacagtagaagggccaaaatagcatggttactaagtgcagtgcttcagataatactttgatgtaagacaccgtgacgcacctctttcgtacgagcagcaacgccattgaactcggattttttttggccgttgaaagcagttgtatattaactcgttcaagtcgctcagtcagtcgtgggctcacacttcctgtcttgttgccgttagagaacaattctaacgatgagctgtagatatctctccacaggacaatttctttccgctctagtttcaaacctcccaaagcctgcaacaacgtcggttttcgctcggaattaggcaaagcaagtgacagtctcgctcgaccgtcatgcaaccacttttcattcggtgttcaaacgagctcgtcgatgccacggagctctgcctggtgcaagacgtgcatctcaccaccctcttggcactgatattttccacacatttgtctcttatccactcccgagttttctcctacacgcggtactgcatagcagacgactcgaaatgcggtgggttccctctattcagtagcatcaaggaggacagcgagtgagctcgggtgggtgctcgcccgaaaaatgcgccgcatcaacaatttatgttacttcagctgatagcaccggcaacttcagcatggtaaactgcgtcccgaacgaccaggaggagacggcgcccatttacgaggatttcgacaccccgtattttctgattgggggcaatgctgtcgtaagtgctagcagttgaaccatatactgtaggtgtaaagttggtcttactgggaaaaatgtatttgtgatcatgaattcgagcctacttcatcactacctggaaacaccatcctgcactacccgcgcttgaagccagtccagcattgatcactttgcaaccgccccacgtctcgctaactcagtgtagagtagatccaggagctcgtgggtgattagcttttgcagcttgcgctctgttacccacgtctccatctcagcgcgcggtaacacgttgtagcagatcgatgtagagaaccgaggatcaaggtccgattcaagtctttgtaaggcggctacgtcgtcattgctcgtgaagaggtcaccccagaacacgtactatagcgtcacagcagggtgggaatacacgaagtgtagccgattgtacagatcgtcgagcgcctcgcgatgcgtgatagggaattctcgaagtcgagggttgatttcgaaagtagtcaggtagtgctccagttcgtcccgtggcaaatgatgataattgtagacgtcgcgccaaaatgaattggcaagcacaggatcttcctgccactgaaatatgtgcaattcgagacggcgatcattatccagttttccgtcaataacattcagcgatgggggcgcagtcgtgtcatgttgaagtgttagcgaatccagctcgagtgttgaggtggatggagcccctccggcgcagccgggctaacacgtgactgtgccacttgcatcatgtctcgggccagtgagttggcgaccgtgtcgttcattcttgtgtatcgctcgaacgcatccgaggtccatctgccgaagagcttgatggcgagacggtcgacaccggcggtgaacattgctgtgactccgccgcttctcattgagtgcgtaccgaaacgcgtcgggtcggccccaatggcttgtgcagcccgcttgatcgcgttgctgagcgtggtcgcggcgagcactttgcttggtggagttgagcagagagcttcgttgctgccgaagctgttggcaatctgaactagctcccatgcggcacagccacggcgagccggatcggtgaagcgttcttgttgtccctgagcccgcttgatccgttttgctaccccgaaaatgtactgacacagcagcagtcatgtcgatggagtcggttttgatgccttgcttggtgataaacttgacgtcctttgtgcggataatgtatggcttgactcggctgccgtccgcgagatattcggatcttctgagcaggaagaaaaagcccacgaccgcagccccccagagcacgcgatcgtgggatgctcggaaattgcatcgtgatcggagctctcgcaggattgcgagtgtgacgggttccttttggtgagaaagtggagacagcctctgcatcccgcgcacggcgaacttgtgtccggcgtggagaccgacggagtaccctcgctcgcgcatacaataccaagagatgtggctaaccgcggacagcacagtgattgtggatagtggctttcctgccgttctcgtagctgagcaccaatagtgaacggcgaacaaggcgagttgatgggagtgctgttggatgtctgcttgtaaccacgggtggaggtcgtgttccaagcaccaagtcgaccattttttccaggtcgccgcgtactttggtcttgagccaggggccaacgcgtgagactgaaggtggacgagaaggtcatgtagaccttgcgtagatttggtggcactggtatctgttgccatgcagacgataggttagtccacagcttgtcgtaaggtggtgtccaggcacgcgagccggcatctgtcatcgtgttggaggatccagggagatgcccgcacagaatgcgaaagccgaaaacagcctcagcgagtccgattgcgcggttcaaatcttgcgcaagcgggttgttacttgctagtcggtttgtccaggatactgcagaagtgttgtcggaccatgccttgattaaaacagtgtgctgagttgcccatgcaggcccgaaggaccatgcagctagtgcgacgcaaagttgctctcgaacgttgatgttgaagccactgcagccacttgctctttgtatcaatctctgttcttccgcatcaaattgaacctggatgtactgcctcgttgctgggttgagtacagcgagtccgctgttgctcgcgtccatgtagatgtggacatcaactggctgggttgaagtatacatcgcaagaggtaatgcgcggagctggcctttgctgagtatcattgcaaaccatcgtaagtcgtctcggatcgcctcgtcgactggaactttcccgtaccggggggcccggacgcatgcagtgtggatgcgttggtagaacggtttagcggcgcgaagacacgaacacacgtgccgtaggctgcccaatagttgctgtaactggatccgggtagtctgcgtttgtacttgcagcgactggactttcccgagggccttcgctattttgtcccgtggcatggagatcgtgcaggcgttggtgtcaaacccaagccccagcacctgaagctgagtttcccacgtcgagaacttttcttcgttgattgctgcaggacccagaatcgcgagcatggaaagccgcagtgcctcattggctatctgtagtatgttgttgagctccggctcaacgaggacgtgatcgttcacccattcatacgcgaagaatggctcatgatcgttggtactcgggtccatggatgctgggcactctcggcttactaaccacgtaatggcaccaccgaacgcgccgtaaaatgcaggagagcttgtccaaccgaagggagcggacatgtcgatgatgaggactccccgttctggtatggtagctgccatccatcgaacgtgctggcttgccagcatgaggtgacgaaaggcaccttcgacgtcgcctttcatgattttgactggcacacctttgtagactgatcggcacgagattattctccgagcaatagctgcgatatgcttgtactcgatgtctggtgaccgctcggttcgtgtaccccgccgaaacgaaagatcatgaatgagccggatatcttcttcgggatcgcagtctttcttcgtgactgcaccaagtggacttatctaaatgttcttccacagctgaagcactttgatgtccactaccaggtactgccccgcatcttgcccttttcaaattgctttgagtactccgttcagatggcgagaggcagacccgtggtttttcatcggattcgtttgcatggggtttgccgccttccacgatggctgaatcccttcgcgcgcgatctgtaccaagcgattcttgtgcttgtacccgtcgagcaagctggcgaaccgggatgggtacatcgctttgttcggacgaggatcactactggattgagcgcggactacttccacaatatcttgtagactcatgtgatgctccagtgccaaagcggaaacgacacgttgcttttccagattgagttgccactgttggttgctgtcccgtagaggaaacttcttggggggcgcaataccaagccgggtgcacatgacgttcatagcagtggcgtgactggacgaccgcgtaattagctgtttgatcaagcattcccggacgtgtgtcgagctgggggttggccgcacttgtttgatctcggtgcaggcttgatccgcggctttcctctggggcgatgcttgctttcggctggaagcacgcgacgacggccgattggtggcaggtttgtcgactactgtatttgtgctggcctttcttgagttgtgcatttgcaatgactcgaactgagtcgcgtccaccgaactggtgtgacctgcttgttgcggatccgacagcatgttgggcggagactcgaattgagcctcgtcgaccaatctggtgcgagctatcgcgtgctgtcgaggtggcttgttatgcagtgactcgaactgagtctcgcgcaccgagcaggtgcgacctgcacgtcgccagtgtcttgcgtgatcgtcttgcgttcccgtgcttcgcgcgtcggcgacaactggtcgtttcgaagcgtattgtgaagacgtttgtattgatgaagctaccgtctgatggtccaaaataatctgtccaaggtcacgaggaccagtgtgccctggaacccatcagttgtttctgtacttgctgttcacaccgccgaacctgcggcgaatgaaatgaagttgcgaagctggtcggaaatcgccgctgggtagaaatgaactctgctctggaagatgcacacactgggatcttttgacgggcagcccctcttagacaagaacttgaggcagacgtccttgccatcctgctgtggtagtgaaggatgtgtgtcatcgggtgttttacgatagccacgcttattcactaagtacgaatcctactaattccgattagctgccgagcgcagcgaaggcggctccgccccctcatacgatattgcggggccgcaggacccgccccggcctctgtaatactaacctgacattgagagtagtgcagcgagccgacgagccgatcggaacaggtccagtactgccgtagcgaagcgtaggcagcctgatctcatagcgcagcgaacattgcgagcgaagcgccaactagcaaaaaattcaccgccgcgtagcggccgcgctcggctacttaactgcaatcagccttaaggttaatatatatcatgattattctcttgctactaactcgtcaactaacagtcagcaaacgtacagctaacagtgagttagtgtctagaaaattttactaacagcaaaacgccctacactaatgatggtcaaacaggtcacacatccggacgctaggccacgtggccaaacttagcaggtcacacccacagatgtagacggtaagatgcgcatgagaatgagagcaaaatgcatatgcagcttcgaagcggacgagggcccacttctcttcagcctgaagaattcagacatcatacaagttttctcagcacacacgacacctccctcagctgctttcttactctgtcagcgcggtttcctacaggacacgacgtgagttgctgctgtggtacagtataagttggctaagtgctgcactgcgggctgcctatcatcttgcacagcgtgcttgctactagtaaagtaccatgttgcgctgcaagtccttgccatgctaaaatgtgggctttctaccagtttacactgcaagagaccgcctaccatgcacggtgcacggacagtggttactatgctaaacggtgagctgctaccacgcgtgtgtgatgctcgtcagatcgcaataacctagatagaggaggtggtgctacttactatgttgcactacgagcaccgtacaaagtcaccaactcgtgctcacggaactccgctcacattcagcgcttgagctcatggactcagcgttacgtagcgttatctagacctagccttcagtcttgctcgacgtgcgtaacctcgctcgaggtcgaagtcgagtagtgcgccgcctgctgttcctgggatcacagcgttgccgaaggccatgggcatgctgcacagatttggccgcacactcgactcgccgtctcgtttctcaaggtgaggtgcattacagtcatttagccttaataacgacctagcaaatgcccgatcctccagcgcttacaattcaatctgcctaccttgacagatgacagcatatgcacacttgctacggtgtgccagtgagagtgaatgtacggcggtcccagctttggcttggagggacgcgagcactattgtccaccgcgacggtaagcgggggagatcctccgccttcgcgactcagccgtctcggaggcatggcgactgtatttgtagcgaagtaggcagagctgtaagtaggtttcggaacactattataccagggaagctagcgcttccgagcaaaccaaagctctgaggttgatatcaaagtaatctgtgtctgtgtttcggtgtaatagcgaggcagccagctcgtagtgcggcatggtagtacaagtagactgtagggctacacaccctcctatgaacaacttcgtcgacacagtcaggaagcgaagccagtaatgaaatttcgccatcgtctccggattctatttcgtactttgtagcatagaaaatttatacgcgcctagaagtagctaacctatcgcatcacagctcagcactcgagctcgacacttcaacatgactcggtccccatcgcttaatgtagttcacgaaaaggtatttctcacgaatatgcggcaccgcggggtcagagaagagcaaagacttatgagagcagcctaccatcaccactgatgaccctgaaacctgctatagtgctttgggttcagaggccgacgatgccgagatggatcatgagacagtagactatcatccagatcactcttttgactacgatagcgcgggataatggtgcggaagtcgctatctgtcaggagcagaatttatatactatccattgcgaatatacatgtgacctcattcgcttaggtcacgtgaccaaagtaaggatttgacccgtgaccaaaatgtaggattgacctaaaaatccggttacctacactgcagggtaggaccgggacacttgcgaccataccgacgagtgcgcacttaacgatcaagttatgcacaggatacaagtaaggtaaggtgccagttgcgtgcctacaaccagttccgtgcctacttgttttagccaattagcatcttctccttgttaaactctcgtagtctattggtagatttttccagcgtcacatgcaatttccagtgatgagcctcctaggatttgcatagcatacaaaaatgctatcaaaagaggcaggaaactggcagctcactccaaatcaacaagcttttcataacaataacaagaagttctgcaaaatttacacggaccagcgtgaagtacataaattcagcccaatcgcgcagatttagcgggtgcaatcagatttcagaatggacaattcaatgaaaagttatgccacagcaagtccgcaagttcgaaggacggcacgaaactggcagaagaccttagtatctgtccttggccccgtgctggagtttgatgtatggcgatcgatgataaaatgggtggcgagaaaacatttgcacgtatgtatgctcatcaagctgcaccgagtctccatctgtatcgtaagcctttctgagattatcaattccgccgggtcggtatccgggtcggcaggatctgctttctttataaagtctgaacgggatcgcgataatcacgccagtaatacccaccataatgacgacaattcacaggtcgaagacctgtgcttggccccggcaaaaaacttgtaactttccagaatcgggtaccaaaccgggtctctctttcttaattgtaatgtttaagctaatatctgccggaatcgggtacccgtcgataaatgattagatttatgcacattatttaccaaaggttgatactaatcgttcattctttaccaaaacttgcgttcaaacacttacggacgctccagtacactatgagagcgtcatggcctcgctgaaggcgtatcaatttgcgccataatcgaccaagcttagctgaagatgacctatatgacttttctagctgcaggctgcattttttacatgtcaatttgctcaatactcaatcacttagccgaagatgcccaacctcgtgcctttcgccaaaccaaccagctcaactcgacagtgacacgagcatcgttcgtttgaattaggctttctttacctgcgttgaagcgcccacttccaaggacttggcacattaacgtgtttctcattccgcaatttaccctcaagttaaaaggtcaagatcagcgcaccatgcatctcttctacgttccgctagctctctcgtctgatcgttagcacacaacatagtactaaatgaacacagtataccttacctgcaaacggaatgaaatagctcgttgctggcgtcaacgcagccattggacgctgaccagggtgttatgccccacgttagaatcacctagagagtgcggctggtagtgctcttttaaaatccttaaaaagattaaaaacaacacaactttgggctttactcaattgttatccgttatcatcgtccatgaaactatttgccgacctgtgtaccctcccggagcaacgctccgggttgcctatactgatcgggttcggaccttcaccggtaaaagagaatccctgggcgtgattagaagcagcagcggagtaaatggagtttgcgcaaagtcgaacaaagggtaggtaaacgaacggaaaggctgcaacaaataaccccaagatcttaatgtcgcgccgcgtatacctgtccagctcattcgatgtcaacaactcgggctgcaggacttaaatagtcgcttcggagcagtatacaacgtaggcaaccgcagcagcctcgggttatcttatccactcgagatatcgtatgaagacgcgctcgtgtcactcaaattgaggaattaccatgatccagtagaaaaataccccaggccgaccgaaaaacaaactactgtcacagtatttgctaagttcgtgatgcgtatttatcaagacgtatctacctactctctgcgagactggatccttgcgctgcgtcgtctctgtcgtcgatggcgagtccgacgtctccctcttgtcgattggtagacccagatgaagtcgatcgatatgcgttcgaaccgtagcttcaggcgcatcggaacgtggcttcccggttcccatgtaagctcccggtacccaacccattggattagataatatactcttacgttgatccaccttttcgcgtatattcgctctacctcatatagctgcccatccacgcctctatgggcccttcgattgcttgcgaagaggccaccacccctacgtcgttcttctcggagtccacccccgactgatgattcttcctcttcctgctcgtcggtgtcttcgtcgctgacgtcatgagcggaaataccgggattcagtcggagacggtaaaacgagccgtccaggcggcgctggatgttccgggcgtggcgctgtcgtgggttaaggcgtggcattgagcacaaagcagaatggggcttgccgaagcactgaaaatgtagttcgcagtctatttctattctaagtgttgccttaaaataaatacagtagacttcagcccggaggtcaggttgtgatttggctaaatttaacgtagttaaattgcaaaattcagattgcagatcaacgtagcatattgcatcattgcggcttaaattatacaaaaagggtgtaccatggagtggtacattcgtagagttcctactccttctagagtttaagagattttcacgaaatattttactcgcgtgttcttagggcacaacactagagatctatcagtttagatttttaatataccttacccaaatatgactcagcaacacttgcatatttggttagaattgtcggaaagcacaatatctattaattatgaagtgttgtttgtcaaaaatacagatcgataaagtataaattggctttgcccgacgaagcttattcttgtccctacagcgcgtttttcacaatctttcgcttgtgttgtggcctcttccccggcttcaaccctcttttaccaatccgttcaggagtgggttcaagttgtggaggaagaattgtgtcgtcccgctgtaaggttgctgttgtcggccaagggagaaatttgaatgtgtacgtatcacggaagtgctcgatcgacatacgcttggcgtcatacaagtcttcgattcgtcggccatcctttgaagcagcgcaaattgcgtggacacaagggaacatttggtcttgccaattgccgcacgtgcactccagcgctggcaaatccactacccggtctgggtgcacatattctggtatggcaacagggcctttgaacaagacgctgtacgcaccctcgagaaggggtgtaaactcgcacatatcagctgcagcttggcggtctgtacgtcgctctaacaacttggggactaaatccgagagtgcgccagattttttccacgttacaatcaattgtcgccttttggacatcagttgactcagcttcaagaagtacaagtggaattcgtccaagggtttggcggtccgaagctctttacccatccagttgttcgcttgctctgacaaatttgaggttatttcgtcgaaagtcgggagattaaacttttcttggaaactgtacttcacccagtgagcacgttcgattccgtccagaaaattcgcagcggcagggttgttcacggcgagttcacttcgatacagcttatagtcattttcacagtcgctgcgtgccattcggcatacccacgcacggtcttcctgggacaatctggaacatttcctgttaatgttgtctatgatatgccgcaggcagtatcgtatggccagcgtttgggaaaattgtcgcgacagctggaagcagacctttttgtctatccgacaatatcgtgaacttttcccagtcaactgcctccttgaatgctcccaggaaccaaatccaattggccttgtcctcttgtgaaaccagcgcgagtccaactggaacgatgtggttgttgtagtctttcacggtagctcccagataaatgccctgttcgtgcatttcctttttaaggtggaccccgtcaaagccgaccatctttttgcagttctgggcaatgtgaataccagcgttagggatgaagcacgctcgaccaaacgacgatccgtccgcggcagtttccactctccaaaccgatccggggttcttgtgcgccatcaactcgaagtacgcccgcagtttttggtaactttctaccaagtcgccgtgaattttgtcgtcaattttctgcttcattctggacaccgatgtagcgcttacgtccgctcctttcgatttcagaaaattcctgatagcggcgcctgacatagaagccgtggatccatcgtgggcgagaagcatctcggtctcgacaatcgctgtcagcttgcttatctgctgcgtggtattccgcatgggcttggacggcaacgggatggacccttcaacacaaggggccttgacaataccaacgaacttgaggtgattgtgcgcaaaatttgcctgggttatcttccacttccccggtttcccgtgaacattcacgaaaaacggacacgtgagttgggcagctggtgtagtccggtcgaaatattgcgttccattgagcgtcttgcacgcaaatttcgcattaccggagttgtcggccttcacactggtctgcttcacaaaaatctggaagccgcacctcacagccaaatctttgcacttgctgtggactgctttttgtaaagaaaagactgaattggcaatattctctcggagctggtaggccaagccatacgttgagcttgtcgggttcgtcgactcgactgcaacatcgtccctgagtagtcccaactccttggcagcttcgagatcaggtacgtcgagtgaaaagcgagcagagccgtagtttggggggcttcttgctcttgacttggacatttgcacaatgcagcagaatatagctgtgaatcaccctttagagaattattcattattcaagactacttggtttttatttagcactagccttcgaaatcttacctcccacgtatctatttcaggtgtcccgcaaataaaccgagagctcgaatttagcccataaatggttgataggttcgcaagtggcgtgccaggcgtacttaggatttttttactgtatgaagaaaatggctgtcgggctgggggacgatccaatacttttctactggatcgtggtaattcctccactcaaattcgacgatatcgtactgtgggtggattttatccgccacctggtcactgtttctgcgtcggatctctcattgggtcggagaaaccaacccagcaaatattagcgcagtcaaccgctatgacgacctccctcggcttacttgctatacaaaaacggatggaaaacatacataggttaggtgagatgcaatccgatactattcgcggggtttatgtgcgattaagaaacaggatagaaatagatggagccatgtgaagtgcgtccctgagtgtactgcagaccccgcataaagaaaactaactccgagtgtgcggcaatgggtccgttcgctggaatgctcactaccgtttctaagcaccatgtactcgtttctatttatagtagcgaaaggcatccgattttagcggagtagcggaggtgtatcgaaaatgctagggatgtcccaccgatctacaggcggtcacaaacggtccgctcggtgcgtcccgcacacctgtcccggatcccccatcattgcggtaaacggcgcgtgctggtgtcggcggaacaagctttcttttgcgtcgctaccgacttagctaccgcgccctcgagtagcacaagcaccggtggggtacggtgtagatcatgcgctgcgtctcgagcgacgcggtgctcacgggcatccggtcaagcaactgtcggtgcagccagtgcctgtgtcctgtgaaagttcctacactaccaaggtgaagaaagccaatgcatcgaggtgtcgtgtccaagcccatctattgagataaggtactgaagaatgaatctatcgaggagcttattggcttcgatgctcgtgtacacgacggattgacactcgtatctccgcatctctttcgcttcttttgacagcttgcacacgatgtcgcacgagatctcttccttccgacgggtgtagtcaactggaccgcggcttccacagtgctcggagcacgcatacgacgatctttcagtctgcaccgtagggcatttgcactcagctgggaatcaggatgctccttgaggaaaacattgtgcaggtactcccatttacctgacacttgaggtatagagtttgctagcgttctgaagcgctcaatatcatcttctgtcagcatcgtaggcggttgctccattgcgaaggcagggtggctggcggctgatggtgtcgcgttgttttcaccaacacttctgcttaacacgcctagacttgcacctgacgctggctcacgtgtactgctgccgcctgtgagggaactttcgaggctggtttcactggatgcaggcctagcttcgtgatcagggacagcggcacagctgacctgctctgtattgaagttgtcagtgctggaagcgtcgtcgtcgctgctggcggcagcatctattagcacgtctggatccatgctcacgctgagtgccgtgttggttgcatcgttagcagcggcatattgctgtttcttgagctgctcgatcgtgcaggcgaagcttaattttgaggctggctcctcgattctcggctcgcttcatcgctccccacctaagcgtcaggtttgattcgcttttcggccagatgccgtcgcacacgcagcttgcgaagctgtaaatagggatgaatagcttcttgccggtgaaaagttttgaggagcggagtaacttgaagagctggatctggatagcttgcttgttggtattggtctcggggatttcgggtcgagtgtgatcaaacgcgaagagctttcgctggcttggtttttgcaggtgattcagagttgggcgaagaggttctgctgctgctgtctggtagaccgctcgttttgacagcactatcgacgacgggcttggcttttactgcaccgttgctcttctcgtcggcaatgaccttcaattttgcaacgatggttgcgtagctgcgttaccgaagtttgaaactgctgttggagtttgcatccacggcaatgttaaacatgatggtggacactagcggacactgcgaccaggtttgctcctcgcgtgcttgctcctttcgcacctggcgcagcagctcgtactccttcagcgaaaaccccaccgacgactcaagagtcttgtggctccaaatgcagcaaggacatgaagtgagagcgcgagaggcggcggttcttcatactgttcgagttcaggagaagtaactcgcgaacgtttgcccaatgtcgccgtggtcgggcaagagcagcttcgacattatcaggcacaacgcgcgcgctgtcaaaccttctgagccactctgaaaattcaaaatccaatgacgatcctgaccggtactgcgggtgcggcatctggcccgagagaatgtgactgacgaatgcgagctgaggtgtatcctggacggtgccacgactcaaaattgctgcttgtgccagagacacaaaatcgaagtccccaaaggcagcattcctaccaaacttggcgcctatccggaggttgtgctgcacgataaaaacatccagaattcgcagaccaacttcaacagagagagcgcggttcagaagcttttttagcccggagtgaaaaccttctagctgactcgtagcgacgactcgtgtcgtagtgtgggcttctgcgtagtcgttattctccacaaacaaatctccgttcttgatctgcgcggcgttgctgtcaatacagccctgccacgtcgcctccgagcatgagagatcactaggcgcacgaggctcgcaacacgacgaaattctttttccatttcctcaggtggacgaagccgtcgctccaccgtgtacatggcgctcatcagctccttcgaaatccacttcttcttcgctgcgctggctagcttctccttgactcgcatcatgacatggaacggatcctgcttcacatctactcttccgccaaacgtgtgctgcaccatcccacgcactccattggcgttgtcacttactaggtagatagcttcatcatcctctggtttcagggttggcttgacagcgtcaagtagcgcagcagtttcctcattgttctccgaccttgtaagtcgacgtcccacaatctggccaacttcgttttggatcaaaagaagtaacttagcgtccgagatgcttgtacgctgccccagcccgtcccaaaccttcaacttcttacagaacttcgcagaatggtccacgcgaagcacctttcttaccgacattttctgcatcaaaagctcacagagcggtccatacatggctgtagtctccatccacgccgcagtgagaaccttggtgtctacgacagcttttgaagcgcagtactccgccacagtaggtggtgttggcgccacgtagtccggattagacagtcgtagacggcgaacgcgatctgcgaatagtgtgtacagtttgtagtagcgggcttggcgtcgacgacggatgttggcgacggtgctactcaggtggttgggggacatcatcccgtcgtgaatcatgtctaggagcggcttggaatagccggacttggagcctaatatatacgagaagtgcaccatggcttcgacattagaatggagatattcaggcgaaatcgtagagaagcatgttcgcgcgctgccagcgcactgatacttgatgtacagcaagacctgttttccctcgatgtcctcaacagcacgctgcccggtgtacagcgacatcccgacaccacgcacgcaggtttctggccacggcacgtagcctcggggacccaaactacgacaggatggtcgaataagcctgcgagaggtgacagttcgtcccaacggttgctgagctccgggtacgccacgcgaggggggaacgctctcttcgcgaggccctcttggatcagccgcttcctctccatctcaaaactgtgactgtggtccactggctaatccctcattattcagataaatgcattgctatcgagctcggaggttttatcggagatatcggattttatcggtgatgtcaccaataagtcgtagcggattccaacctttttagtagcggaaataagcttaatccccctcgctccgtccatccgggactcgagtacaacgacgcagtttcgagagatcgataacatcgatgacgtctacagttggctaacggagacgttcattccgacagtcttccttacgaccgattacaatggcacagctctagcgatggatcatcgaggtctgattgcaagtaaaaaccaagtgctgggcggcgtgatcgtggagataacccaggtcgttccaatggtttgtgacaataccgaaacttttgtgagactgtatccaatttgcgggggtatgtattcaggcacggcgtcttccacgttcctcgatatcggcttgagttcagccgaggctatcacgaaaatctcggacctgagagcaaacgatacgtgaataaatcattacaccgagcaggttctcgttacagttgcagcatacaatggcgaagtggacggggtttcaattaccagacttcagatggacttccgacagtctggaaccattgagttgaaagccctgacgaaggcaataccagactaccgtgaacaagacctagcgtttgcttacactctaggggcgactttcatcgctctgggaatctggctaattatttttggagtaagctgtggcgccccctgcacgacttggtcggagtatctggtcaaaagcaaatgacctcttttggttctgcatgaagtttggagcaatccccatttactttggtctcctgattaaggcgttgaaaacaaacgtcgatgccaacactcccgtggagttggtaatgactgcaagggagcctgcgcgaaaggcgcatgcttcacacgttgacaaacctcgcaagcacggacgtacttgcgcacccatttatactggtgggcccagtagaagtctcgcgtgagaagaaggtatgtcttctcacggcccggatgtcccgaagtcggtgcatcgtgatactcgtacatgatcctgagtcgcaggtaatggtcattgggcacgacaacgcgctccgcgttgtcgtcgactgcactgtagagtaataacccgccgtgcacccgggaacggtgtgcacgagcccgaagatgcttcggcagcttctgacgagctttgtcagaaggcgctgagccgtaggtcagcaagagcttcgcgtacgcgcacgacgcggacgcgaccttcacgtcgtccaacagtgacgacgtcggggtgctcgatcgcatggcgtcaatggcattgagtcgtggcgtagtcaggtcgacgcgagagcgcgtaggccaccacattgagtcttccgggtttgtactcaacccggaagttatactctgcgaagaatgagagccgtctcgccatgcgttgcgagatgtgcggtgacttcacagccgtccgcagcgacgcgtggtccgtatagaccacgaacggtttgcttccgagtagatacactcggaacttcgcgagtgcgtacttcatggcaaggagttccttgtcatgtaccgggtagttgcgctcagctggcttcagctgacgcgattggtagtagacgacacgatcacggccctcgtgatcgtgctgcatcaacgcacatgcgattgcaaagtcggatgcgtcacacacaacgtcgaatggacgatcttggtcggctgacgccaagatcggcgcctcagtcaagccccgcttgactgcatcgaaggcctgctgacactcagcagcccaaacccactcggcgtctttcttcaggagctgtgacagtgggtgtatcatgcctgcgtagtccttcacgtacttgcacaagtatgtggccaagccaaggaactgccgcagttccttgacgttcgacggcgtcgaccactcattgatcactctgaccttctcatggtcagggcggacaccgttcttcccgacgagacacccgagcacgggtatctcgctcgccccgaagatgcacttcttcaggttcgcatagagcttgtgcttgcgcatgagcgcaagcagcttccggtgatgcaccttgtgtatctcaacattgctcatcccgtccgcagcccgactgtggacgaacacatcgtcgaagtagctcggtgtgaagtcgcgcaccgagcgcaacaatcgcgttacgcacctgttgaaggtcgcaggggcgttcttcagaccctgcggcatcactagccactcccagagcatgccgctcggcgtgctcacagccgtgagagggatgtcgctctcacgcatgaggatctgatagaacccatcgcgcagatcaagagcactgtagatagtgctcctggccatcgaatcgatgatgacatcttttcgcggtatcggtgtctgcgccggtatcgtcgcatcgttcagcttgttgtacgcatgaacgatgcgccagccgccctgtggcttcttgacacaaaacgtcggagcactgtgcggggatttcgattcccgcacttgtccagctttgtgacgactctcaaagaagtcgtcgatcgccttgaccagctctcgcggcagtggccactgccgcgtgacacagtacttcgtgcccggcacgagatcaatctcgtgctggatgcgttatcctgcggaagctccgcaggaatctcttccaggagtacgtccgcgtactcccgtaagatctcgtagtaggggctcgtcttcaatgagtcccagctctgctcttcaaagcgctccttcttcgtcttcgcactgagagtgtcctcgctctcagtggtgctctccatgaagaactgcctcggttcttcattctcgctcttcgttctctcggcgtccgagagaatgcatatttgctcgatgcgtccatcgtgcaagtcacgcgcgaagcgcttccagctcatgactggaagcgaagtcaactccgacgcatgcgtcggagggttagcgagagtcatctccctgtaccggaacccggcacaggtacgcgtcaagacgttcaacgtctcgacgtccggcttctcagcctccgtctgcccggcagacatttcttgttgcgtctcggccccgggacgagacttgcgcagcgatcttcgcatgcgccgtcttcttgttttgcggatcccggctccgcttggttcttgacctcgtccaggcccagccgtggacgggtgttcttcttcagtaccgccggcgggttcatcccgcgggcgagcgacttcaagcccggcgtggtcgcccggcgcttcgtcgtgcagcccggctgcacgacagcatgcaagtttttccggtgcgggacgtttgcaaccttccgcaccgcctgcagcgtcggctcccggagccgacacgccatcttcacatcgacgcctgttattggtggagccctccattacggagggtgcgtcggctccccgagccgacgaatcaaattcgtccaagctatcgactcccggaatcgatgcgacttcaatacctcgacgccaaccattggcggagacccccattacggagggtgcgtcggctccccgagccgacgaatcaaattcactcaagccaacgactcccggagtcgacggcgtttcgtcaccttggctcttattattggccagacctgatccaatcagattcgcgtcagcctccacggctgaggcgtgtgactcgcctgcgtcatccgtgccccttgaggccggagactcttcctgattcgctgaaaagcgggtgtcgacctccgaggtcaacacatttccatcattagctgtcggcggcaacgccgacgctagctgctcttgggcgtgtgctcgcgcgcgcccagggcgctccgggacagcggtattaggcgctgtctcgaggggggagtcgcgcgtacctgtcgatgcgtgcgtagcggcaacagggccatcgctcactgttccgctgtcgcgaccgaagcgcacgagagtgcgcttctgccaatcgatgaccggatcatgccgtgcaagccacggcatgcccaatacaatgtcaaacttatcgtccagatccaggacgataaaggtctcgacaaactcttgatctttatacgtgaagcgcacgcgtactatgcgcttctcggtcttcacgacggcacccgttgtcagtcgtacctccaacatacttcgaggtatctttaaatcctcgaagttaagccttgatagacttcgcagttgaacaaagttcttcgacgcgccagaatctaccaaagcacggagtgagctgcttgctctcatcgagttcacgttcaggatgacaaggtcaggcttgtcatcttggttcttgcagtgagaatgaacctcactgggggctgcagtcctcagtgtcgcgtgtccaaggtcgacacgcggaactgcattaccagtagggcgccccgcgtctactgatgcccagcgttttttgtttggttgcgacggtgcccggcaccgccgcgatatccaccctgctggtgcacgggggccgtgcactcccgagcaaagtgaccgactctaccgcaacggtagcatcgcacattgtttccctgtgactactggggtccagcagttgcagcactcgagaggtccatgggttctgggcctcccgtcctcactaccgggcgtggctgtggcctcgccacatgtgcatgcagcttagcctgccgcaggctaaactcctcctgcattgcaagagtaattgcagcttcgagagtactcgggtactcacggaagagataggcacgtccgccaagacatgacatggcgaacgcaaccttcgacaacgggtcgacgatacgtcgagccgcaatggcagtgtcgagatcgacaagccaacggaggagaggctcgccttctcttccgacatagttactcacattgagctttagcgattgcgcgcgtggtgtcgtcccggacgacaccgcggtagtagcagcaacatcgcgttgctccttcaggatgaaaccctgagcaacaccgtgttgctctgtcggcgttagcgtacgcagcatcgtagctacagccgcctcaccaatgactgatgacagtcgttggagggcctcccactccggatccgacaggtggggacagtcagcgcgtgcaacgtgagttgcaggcgtagtggagctttccatgggcacctctgtatccatgggaaggttctcagctccgcgttcgtgcggtgacgtacgaactcaggtagtcggtcgttggacggactacaaagtgctaccaggtgtaattggcctactttggcccactactttagcttacacgtgtgcgcgtgtatgtgaggaagcgtagcttagtttaaattagagttaattatactcgggcctccgagtatagattaatctaaataaacgatccaaataatgtttttgggttaaaatgagaactgctatttttgttttatgtttctgacttcctctaaatgtaatattttaaactaggaatctgccaacggctggttggcagaattccaatgctgtgcatgtcgctgattggctaaaagatgctgctttcagccaataggaatcctaagtctctatggaccacccatcgtggtgattctaaatgtatgtagcatttggtgtgtctacaccgaggtcgagaaagtctttcaaacctctaacagacgtcgcgtcggttagagttacaagtgactgtagccacttgtgcgtgtaaccctgttacaagtggtggctgtatattttgtgacgttcagctcggcattctatttctgtgtgttggttattttgaattacggatctaactgtggtccctttcattcggtctgaccttctgttcattcggtgtggttcatcccaggaacacacccagcagactttattctgtatcgcaacaactcaactcggtgcaatccggtccgccaaaggtaaacgatacctataggggttgacacaagcacacacgccaaacaccgggccgcattagtgcgattcggtgcgtccaagcggttccaggcccgggtcatttagtgtcccgtgggctgcttatcgcgtggacaatctctggtactccgaacccgaattcattcggtccggcatagtgcgctatacaccctggacgataaaggcgttcacccgcctcgcctcaacgaatagaccttcgtaaggcaatacacctacgtaaacgttcaattaacaattcaaacccatagtctctaacatgagcgatcggatcctgcgatgctttgtaataaaactcgtgtaaatcagccgatatgtgtttttgataaaaattattagatttataagacccttacacttgaaatttgtattggctcgatacctacttttctgtggaccacatatttgaagccccgaattaatccctattgggtttcttgtactatagagtagcactaccaggataatccagtaggtatgtactgagttgtcccccactgatgtgtcaatcgaatctactgagccagtaaatatttttttccagtttacatagttcgtgttgcgaacttagctagtatgcaaccctggataacacggtgatattgactgtacgctgatgtgtaacggggtaagagataccgtcactagcatatactgtggataagaggaagcttgcgaggaagcttgcaataataagctcaagtcttgtctttagggtaaaatcaactctgtttatgtatgggacggggacggagtcttgtaaaccactcaaatctaagtctgcacctgattggatgaaatgggtctggctccccactttcaaccaatcagaacatgacagcaggtgacacgctagccgtgtgactgcacctacttttgtgtatgtacctatgtaacttctacctacttataaatgggccctttacatgatgtcattgcggcttctccatagtggctcgattttcccgtcgccgtagtgtttgagactagttgttagatgtaggagaggtaagcgtgcctcgaaatcactactatctccaatatccgcagccgaccttcgtacaagtaaactaggcaagagcgcaacgttgattaggaaggatactgtataaagatgcagctcttggaggccacgccgcctacaaagcgtctgcaaatactgtgtgcatgcggagcagactcgagaaggcttctacatgtagaccatgaaacggaaactgcacgcgctgctgctcgtgctaacgctttagatgcagaacggtcattcaattgctacatcaaattttactagatgttagcatccaatcgaacattacacaataacgatttagacgagtggggaatgcaggcaaagcccacattaaacgaccctcctccacttggcccaataaggactggatatcattgacaccgctttgtgccactatgcagccgctgcaacagagaaattgaccgagctaggggtggtataactgcagcgtgctggttgtttccgcacgcgagagttaggtcgtcacagtgctgatcttcagccaaggttcgttaggccgttggtaccgaaccttccgataccccgccggcgcgtgcccgactggcaacgcaaccaattttatttaactagataaactcgtagcagccgacgcggctgactaactaacaatacacgcactacctcgacacgtacgcgctgaacaacttcgtcaccctctaaaccacttggacgtacaccaccctgtgtcgtcgtttcttcgaggctttacgcacactgtccacttgagctaagctttggcttattgacgacacggactgagctcgatacccttgataattgctaagatgttccaggaggttgcctgcagtcgatagtcggtaagggagacacgatcgcagccggatgccggagcggtttcgcgtctcgaattcctcggagctctgacagagtaaactagcagagtggagcaaatcgaagtgccgagggtcggtgctgtgcaatattcctgctttgtggagtagggcaattattcgtgatgttcctcgttgaaggccattcaacgcgactgccgtattgaataaatcaactgccataatgacgattactgtcgttgtagacgacgcgttctgcatactcgtagcgatgtaaaaggcgttgaagaaatccaccgtgaagatgaccccttcgggcatcaagtcttgtctccgaaagaaactaagtgaaacgatgttcttcataatgactttcaagacggggaggagaattgccaccacaagttcatatccattgtcagcagcagcctggaacagcacttggtactctggataaataagtatcagcgaagtttgagacgtaaggagtacgaaaaagctaaacaattgccctttgtgctgcaaaacctggcggacggcgtgtccgccaaccacgaaataaaatgcagatacaataagaagaaagaacgggacagtcattgtgatgttcatgaacggaatcgtgaagaaaatcttgtcagcgatgagtatcgacatcgctgcgtagcccaacaccaccattactacaatcgctgcaagttgtcgctccgacattgcaacatcatccaccaagtgaagaagctggacgagaaacgaatgggacacagcgccagatacaactcccgcgcggatccagattccataattcacgcgccaaccttcagctgggtcatgcagcggcacggattcttgagagaggacgagaattatcactggtagtggcgttattaggcacacgaaaattacgcgcctccacgaggtctttcggacgtactcgtccagcgcgatcagcctctcgatcgagtatttcccgtgatggctaacctgcacggccaggaacgcttgtttcattgtgttgattgccgttctccatacaggtctgggaggcggacgtagagcacttctcgagttgttcaactaaggtggatacgccgtcgtaggccacgcaacgctagcatcgtattaaccaaatccacagccataatgaggaccacagtcgttgtggatgacgcgttctgcatactggcagcgatgaaaattgcgctaaggaaatccaccgtgcagatgaccccctgtggcatcagttgcgcccgatagaaactcagcgacacgatgttcttcatgattagcttcacaatgggcgaaagcgctaccaccaaaagttcgcatccgccgttagcagcggcttggaacagcacttggtacgccggataaatgaccatcagcagcgtttgggacgcaaagagtacgataaagcgaagtagctgctctttatgctgcaagatctggcgaacaccttcaccaccaaccacacaataaaatgcacagccaaaaaggaggaggaacgggacagtcatcgtgaagttcaagaagggaattgggaagaaaacctggtcagcgatgagtattgacatccctgcataccccagtatcataatggctacaatcgcagcaagttgtcgcttcgacatggccacgtcgtccaccaagtgctgaagctggacgagaaccgaatgggacacagcgccagacatgactccagctcggatccatactccgtagttgacgcgccagccctcagccggatcttgtagaggtatagtctctagggaggtaacgaatattatggctggtagtggcgtcaccaggcaaacgataactacgcgagcccatgaggtctttcgggtgtactcgtccagcgcgatgagtctctcgattgaatatctcccatgatggctgaattgcatagcctgccacacgaaactcactgctctgcataccgatctttgcggtgggcgcggagcgtggtatgaaggtccgtccattgtttctgacacattgatcggagaggttgacagcaacaacctgcatgaaactaattaaagtaacctatcttctcaacgtctgcagcgcctcgttgctcatcctcttatgatccccaatatggaaaacgtttcgcacttgctcccgaatgtcgagcgacttgccctccttctccttggcctgttcgccttcaatctccgaagtggttttgccctgttttgccgcctcaatgtgtttgttgagcgtgttgtacagcagatcgaggattttcggttcgaagagaccttgcggcagatgaactttggtcgggtccacgagttcaagtcggagttgaagcagtctcggcacgaaatacgccttcctccccaataatcggcgggcctccaagcacgcttcaagctcgtctcgcttcatgactcgataacacaaactagttcgctccattcgatccagtagagccttgtggtcttttaaccgcttcatctctccattgcgagcatacacgtcgtcccagaagacataccagaacgtgacggccgggtgggaataaatgtatcgcagtcgcagataaagcgcgtctagagcatcagcgtgagtgcgtggcagcccacgtaacttggggtgtatctcccgaacgcgcaaatgatgttccagcttactacgcgggaggtgcggctggttgtagacttcgtgccagaagccgtcgctcagtgtctcgtttcctctccgatgcttctcctccagtcgccgccgatactgctgatcctgagaccgaagcttgttgacgccagccttccagtcgggctcagtctgcgagaaaattcggtgtagttcctcactttcctccatgtctgcggtgagtccgatatgttctgggcctttcgtggtctctcgatgtttgagactgtggacgatgccagtgtttggcgccacggcatccccctggccgtctcgatacgtcatggagatgctaaactcttcagccataatgcgaggggttttgccgtggccgtcccactccgtctcgacgcgaatgacgccccaagtgtagtaacatttgaacttgaccttggtcatcctcgtttccgtgtaggttttcccgaaccttttgacttcacagatgccgtcttctagcgttacttcttcttcttggacgaaggggaaccggatgctggtggcaagcgcactaagtgctcgtagtttctgcctcacttcacatctggtgataatccttggtgaaaagttaagaaaaaataattttgccaagttccggtgtgtgctggcgctgtcgtttaggtcgtagtcatcccgcagtgttatcacatccttcgacgcttccccttccactgcttcagcgtcacccactgcagtttgaatgcggtcgtcgtagactatgatgcagtggaacgggtacggcttgacgtacattttgccaaaacccgagtgtctattacgcggggcgtccacatctccccaaaacacgtccacaccttcaagaacatccagaactgctcgacgggacgaactgtgtacggattttcttcccctttccagtgcgagacaacacgatgagcccctgaagctacaaccgcttgctccaagtctgctagccgattagcaatggtgacacccgaatagtcatttcctagcttcggctccgttatctccagcagcgtcgcctgccagaaggcctgccacacccgatgcttcacctccttgtccgggttccattcggggacgatgtccaccgctcgagcgtcttcgattcctcgggaagtgtcgctgaatgacatgaacccggttgtatccttgatccagagtcgggttcgcttcatggcgagcattatcaccgagaccatgacgatcaagttcaaaacctgcacgaaaaccgcaacccctccccagcctcgaagcgaatttggaccgatgatcactgcagcgcagaagcacgtggtgaaggccgctatcttggaactgatctcctggacgttgttcatggggtccgtgaagggtttgcctctgacggtgaagatcaccacgaagatatagagtgtgcagatgagacccccacgcagcccagcgctcgaacgcgtcgtacacacaatcagaaacgccaaagaaatcttcacaccgagctgcacgaccttgtagtggctagagcgttgaccaaagcctgcgtatagtgattgatagggacagcgcagttgactggggtctttcgcaacgagttgtgcgtacactttgtccgtgaattcgaccttctctccgtccaagttgtgggtcatattcgcgttttcgtgggatcccgtgggcttgttcttcttgatcgctctgtagaccatgcaagggagcgtaaatgtaaagctaccccagatcactacggccatcgtcactgccagccaccagccagagccgtccttcatcctcgtaatcaccagatccgtcgcgccgtagtgagcgtcttcgtagtccatcttgggcgcggcactggcggcgatcacgtccagacacagccgagtgagcggcagatacaccgtcaagcacgccgtgatgatgtacgtgaacatcttgaaccgcgtggcttgcctcactgccagcgccgcccacatcgtggcttcgtgtccgtgccgcagctcctcaactcgactgtgcatgtgcattcccgtcttcaagaaccacaagtagctcacccacactgcgagaatccccaggatgagaaacaccacgaacacgttggtagctgtcattgggttctgcaagaaggacgacacgtccacgacgaagacgtcgtagaagcggctaaacccccacagaatcttgcgcataccgctgccaatgtccgagtccgacaaatacgcgatcacgggcacaaagagcccagcgaagaagaggccggcggtctggaagaaatcacgggcgatctccactcggagcagaggtggcaaccccatgcgctcgacctaaccgaagaaccctgtgagggcgataactcgcccatctcgtcaaactcgttcgcagcctctttgtcgtcttcacttggtctagtgattcttcgaaagccccagcttacgaaaccaatcccgcagctcatctggtgggtcgtgtcttaatcggctgaagagcagccgactcccagcgccattgtagccttctttactcatgttcttgtaggaccccatgacgatggccaacatcatgttcagaaggatcaggctcacaacgaccatgcaagtccaatagaacacaccggagccggtgatgtatcgaatactgttgtagtcaaattctccaaacagcatgttcatacacgactccattgagttagaggccatggagaactgcagcacttgcttgccgaataaactgtttccgatgaaggagaacgtgaggaagatgatcacgaaaattaaggcaaagtccacaaactggcgaagagaatttatcacagtgcgagcgaaaattgcggtagcgggcaaagtgccgtagtgtatccaactgtgcgaaaccaggtcgaacccaagcgcaaaagtctggatgtgatcacgccaagagaaaaaacgcggcggcgttcggagctccttgaggcattgaaacttctcgtcacttcggagtgcctcgtgttatccgagtacttggaatcggtcgtcccagtcctatacgcaaactatatcgtggtcatggtgcgcctgccaagcgcccgttatcacctggaaatggatggtatctcgcacgataacgtcagcgaaaaagtccaagcggtctttgcctacgccctccttgaatttgtatctttcctgatgatggtagttgtactgcagcgaagatgcggcgtgaagatacttcatcacctcgcatttgtgctggagaaccacatgaggcttattcaaaatcagctgataacgtggacactgctcacgcttgtctcgcgcgttgtgcactttggtacgtacattgattagattgtcgtattcctctcgtattcctcagcaaaacctccaatttaaccctctctgttgcttgcaaccaggcgttgacttctcattctagtttgcttggcttaagaagtgacaaatcgaaggctatacggcacttcgtctagacatgcttcaaaagcatagtttcatgaaagaacttgaagcataaaatgatgtatagagtcccgtaccgctggactactttttgctaaaagtctggcttaaacatgatgctatggttcaccaaccaaatctgaagtcgacacctagacttgtgcaaaatagaaagctcaaattagtttcgatgaagaccacaagacatcaagaaggacctcgttcaaaacgctatgctcgcttcttcatatgcgcctgacgttttggctggaccctcgtacgcctctcacacggcaccgtcttcctggaggtggagagccgtagctaccaaattaaagcacgcttggctgactacccagattagccatcgcggtaaatactcgattgaacgacttgtcgcgctggacgagtacgtccgaagcgcatcgtgggctcgggtgattttcgtttgcttaacgacgccgttaccagtcatagcgctcgttctttcccaagaattggtgccactccaggatcctgctgaaggctggcgcgtgaactacggcatttggatccgtgcgggcgttgtggctggtgttgtagcacatacaattctcggtcagcttcagcacttggtagacgacgtggcaatgtcgagacgacagcttgcagtgattttagcagttatggcgctgggctatccagcagcgtcgatagtcgtcgccgacaaggttttcttcccgatcccgttcatgagcatcacgatgaccccaccatatatacttcttctcggttgtttgttttatttcgtcgttggcgggaggatcgtccgccaaattttacgccatcaaggacagatactccgcttcgctgtactgattgcagctcaagtactgatgctgctagtgtatccagcacaccaagcccttttccaagctgttgctgacagtggactggagattttggtcattgccctgcttcctatcttaaaaatcatccttaagaatattgtttctctgagtttctatcggatgcaagacctgatgccggagggggtaatcttcacggtggatttctttaacgccttctacaccgcgacgagtatgcagaacgcgtcatcgacaacgaccgtaatcgtcattatggcagtcgacttgttcaatactgtactagcgatggacagccttcaccagggggtagtaaatataattgcgctgctccagaaggcaggagctctgcaaaacaacgaccctagaagatttgacctggtgcacacggcgtgtttactctgtcgagactccaacgaattcgagacgcaaaattgcgccggcatccaactccgatcctgcctcgcttatcgactttcaggtgcaggtgaagatcttctcgaacggctcgccaaatatccaggataccagccacacaccagatcatcgatcagctacgtttctggcagaatttcgacaagtaaagagaccgcaaaaatcacgaaaaaacggcggtggcattgtggtagtcggcggagtgccacgatacagcctatccaggtaacaaccgcttcaaacaagcgctcaagtttcggcacaaagccgaatggcttcaccgctggcccattccgacggtcggagctccgccaagcactcgaaattctattcacctcggaatgcctcgtgctctcagagtacctggaatcattcgttccgctgttatacgcaaactttatcatggtcatggtgcacttgccaagtgcccgctatcatatggagatgactggtatcaccagcgataacgtcgatggaaaggtccaagcggtcttcgcttgcgcacttctggaatttatatcgttcttggtgatggtgcttgtcgtgcaacggagatgcggcataaagatacttcatcacctcgcgtttgtactggaaactcatgccttgcttattcaagataagttgatgacgtggacacttctgacgcttacatcccgagttgtgcacttcggttcgtatgagtacagtatgactatggtgcgatgatctgtatgatgaactaactccttcttttgtttgtatttaggtttcgacttcacattccagttcgcttggttagcgtgaagtgagaagccccgactacttaaaacccaaaaatctctacaccagcgtggaattgaaccatcgaaccatgagactggagtcatggagacttgaagaccacgcaggcagcggtttttctcggtaatcaaggacatcttgacataaagtactgtgtggctatgggggccgaaatgccgcgcttgtcttcaatgaagccaactatctcgttaactaacaaagccaatcgccctccgacatatctttccctagggaacccgtccagtgtgtttgcaatcagctcatgatacaaatgatgacggtcgctgactgcaagacagaaatgtattaacaccagtgacgatgagactgccgacgaataataaatagactggaaggtgggcatcgcgtctaaattagtttgatgagagtcacagcatattctcaccgccacctgattgtaagctcaagactgccccatgatgtctgcacgtgaagtcttggatggatccgcatcccctcgacttccaagaagattttgcgggtgttgggcgcagtcaaggaggcgtggttgttcacccaaatcagtcatcgtggtaaatactcgattgaacggctccttgcgttggacgactacgtccgcaacacttcgctggcccgagttttgttcgtctgcttggtaacgccagtgccagtgataatcctcgttctgtcccaagaatccgtgccactgcaagatccaaaggacggatggcgcgcaaactttggcatttgggtccgagccggagttgtggctggggtcgtgacccacacgatcattgtccagctgcagcatttggttgacgatgtcgagatttcaacgcggcagcttgccgcgattttggtcaccgccatggcagcctatacagcaatgtgtgtagtcgttgccaagcacattttcttcccgattccgttcatgagcatcaccatgactctgccatatctgcttgttctcgcttttttgttttattttgcggttggtggccaagctgtgtgcaagattctccagcacaaacgacagttgtttcactttgctgtatttctcgctgcacaaacactcatgtcagtgatttatccaacgtaccagatactattccgagttgcctctgataaagggtacgaccttttttttggccgttgctctcattcccgcattgaaagttatcatgaagaacatcgtctcgcttagcttccatcggatgcaagacctaatgccagagggggtcattttcacagtggatttctttaacgccttctacatcgcgggagttcctccaactcctctttacgtcggagtgtctggtgctctcggagtacttggaagcagtcgctccgcttttgtatgcacattacatcatggttatggtgcacttgcctagttctcggtatcacctggagatgaccggtatcaccagcgacaacgtcgaaggaaaggttcaagcggtcttcgcttacgccctgctggaattattatctttcctcgtaatggtggttttcgtacagcgaaattgcatcctacaccacctcgcgtttgtgctggagacccacatgccgttgattcaagacaagctgatggcttgacgctgctcacactcgccgcccgagtggtacacttcggtacgtaaatcgctcggaacctaagcaatgctatcacgtcttacttatttcttatgtgcgagcacaggcgctgacttcactttcgcgtttgcttgggtcaagtggcgcaggtggcaataccctcgttacccacgtttttctttcacgtggtcgtgccggcttgtttggtacggcgctagctggcttgcctccgtctgcagggctcaggccgctgctgcgtcctcgccctccgacagatccttcccacgcggcttctggcaatctctgtacgatcggatattctgcggtccgccaaagattgcggcgtgctccggcatcatacagagctgcggtcttggacctggagctctgcaccaacgcacgagtagcatatctggccgcatttcctgctatatcaatcaagctggccttccagtctccagtattaataacagctcgagtctttacgtgctcgaagcgcactgtccgggtgttcccacgagtattgagcagcagccgattcttgaccggagaacgcgaggacgtgacccagcggtcgcgcatccagtcgatcacccaccaattcatcgcgttcgcgagcagttcactgtccgagaagatcatgagcgtctccctgtgcacaggatcctcgtcattggcccgtcgtcggggtttaatcctccggttgggtccaccacgaacccgcgcgcccccagcatgaactcggcttcggccaaggctcgacagccgaagatacgctcaccccgccgcgttgagtgtgtgggcttgggagaccgacgagcagatgagcagatgccccagaagctgctcaccacgacgtagaacttgacctcgttcatggtcccggtttggtagcgagagtctgtctattcttatgttcgtaaataaactataggagacgaactgggacgcggttgatccaaaaaaaggtatatctaatttagatctatcacacttcctcgtgtacaccacctcaacttgacgtggcgaacaatccgagcccctatccttttatccttcgtgttgccaattcgtctgcaccctaaaaccatggaggagcagttgtacgcgctggtgctggagctgtcgtcgcccgagcagcgcgagagtgcgctgctggagctgagcaagaaacgcgaggagttcccggagctggcgcccatcctctggcactcgttcggcacggtggcggcgctgctgcaggagatcgtggccatctacccgctgctctcgcccccgcagctcacggcgcacgcctccaaccgcgtgtgcaacgcgctggcgctgctgcagtgcgtggcctcgcactcggagacgcgcacgcactttctcaatggtacggttaggctagtgctaacctgcaggttaaggggaaggataaggaggataaggtagtgctaaccgttgttgcctttgttgcatgcagcgcacatcccgctgtacctgtatccgttcctgaacacggtgagcaagaatcgcccgttcgagtatctgcggctgacgagtctcggcgtgattggcgcgctggttaaggtaaacttaaagagtttgaggggtgttgcactttagagagaaggttaagcttaacttaaagttgtgttgctgttttgtagattgacgactcggacgtcatcaacttcctgctgcagacggagatcatcccgctgtgcctccgcatcatggaggccggcagcgagctgtccaagacggtggccacgttcatcgtgcagaagatcctgctggacgacatggggctcacgtacatctgccacacgcccgagcggttctacgccgtgggcacggtgctcagcaagatggtggcggtgctggtggaggcgcctgcccctcgcctgctcaagcacatcatccgctgctacttgcgcctctcggacaacccgcggtacgatacgcacaattctaaaacttttctactcatggttaacactatcctaaccttttcttggttatggtaatgcttattgtgttgctacagagcgaaggaggcgctccgtcagtgcttgcccgaggctctgcgtaaccacacgtttgacgaggcgctcaaggaggacgccacgactagccgctggctggcgcagctgctgtacaacatcagcacggacgctagtgtgggcgctggggcggtccagggagcacgtctctccagttaggctggccagtgcggcggcatgacaaggacgtacaggtagactggagctaggaagacaagagcaaagagtgacgagaagaccagaaacagatatttttcgcaaatagtgaccaaacctacagaacggtccaaagaggccgcgttgcttcgcggcccaaaactagcagcagcctagggggctggtaccagggtcttgatgatactgttgtacagtgacgcgtacacgctctcgttgtgcttggccaggtgacgcagcactgaggtcgcttcggtgatctcggctgcaaacggagctagcgacgggtgcaggtcgttcgagttgcttccctttgagagcagcgcagtctcgaatgcacgcgccgcacgcgagaagaagagcttgaagacagggttgtcggcagcgaatgagccgagcagacgcttctcgagagcttcgagctcctgttgagcatattcacttcgggagctctctagctgacgaacgtcctgggtcgcttgggctgctagctgcgcaccggaaacaccaggagaacgaagcagggtgctcagctgctggccaactgcctggaagaaccctacaggtgtagtcagactgcgacgagctacgtactcctgcaccagtgccaggagactcgacacaacagcgatgcggtcaagtacatcacgccaggcacggattcgaggaatatccagctcgaaagtctcgggccaagcacgtgaagcggtaccatcaatgtgcttctccacgagggaccagatactcgcgcgcacaaatcgctcaaaagcagccccatcgtagcgtgccagtcggctgcgctctgcatcattgacctccgagcgagacagataagcttccaactccagacccagccacttcacagtcatggggaaacccgcctcaaaacttcctgcttcggccaagcgcgcttgaagttgtctctgctcatactcgacgccgtgccgctgcagataagcacccaggagacccaggtgcgcgttaagtacatcgctgcgtagctcatccactttatccaaagcgaacgccaaaaatgccaccagcaactgtaccggtgtcatgactccagctgcaattcgctgggcccagtcggagcggaatccacgcgtggactcggctcgggtcggagcctcggttcgctcaatagcatccaggacaccgttgcaccgagcttgaattgcgtgaacgtttcgcatggggtcttgcatcagctctcgcaattggtccggacgcaatgcactgtccacttggtctgccagcgccgaaagtcccgagcctaaacctgcgccgcttccacctcccaaagcatcccgaaaggtagtccggagctcttccgtacgagccagaagcgtctctacatcgtttgcttcgatcacgcggtcccagaacgccttcgtcatcgcttctcgaacacggaccgccatcgccgccaccgactgcttcgatgccacggccgctgcagacgcttcgacatctttatcccgaggaatctggaactgcgggttcaaaatcagctcgtgcaccagcttccggtcagccagtagagcctggttcacactcggcggaactgcgttcgacgtcttgctttccggttcgtcatcgccctgcatctcctcgtcatcatcccccttcttgccctgatcaccttcatcacctgaatctatcggcggggatgaagacaaagtcgtgtcatcatcggacgaaccattattgcctccaccacttgaacctgaacccgatacgccggccccaactgactgagcgccagcatcctgctcctgcttaaggctctgccccagctcctccaccttctgcttcgctccatcccttcccagcagtctctccagagccctttgcatctgcatcaactgcccttgcgtctgtcgcagcagctcgtgtactccgtccacgccgttctgtgcctcctgcgcctgcgtctcatacttcctctgcaccagcatcagctccctgtacgacgccagcaactcgttcgccagccgctccgcgtccctcgccttccagcgtgcgaaagcttcaatgtagaacgcgaacctagccgagagcctcgacacgcacttggtcagctcctgggtgctctggaacccatcatccttcacctttagacactgggacaagctcttcatctcgctcagaatcacactcgctgcgtagtgcagtctcatggacgggtcctggcccatgatctcgttcgggtggatcgagatcatgccggccatcatcagcacgcggaaacttagccctcctccattcggcgaggcggggagaggggaggcaactttccgcacctcctccgcagtcagcaccttgagcagcctctgcgccgcctgcaccacggggcgctgctgcagcagcgtcatgcactgctcgaagctcgccgtggccatctgcccccagcacttgaccacctttgccacgtcctgctgcacctgcctcagcgccgccgccgtcttgcggctcgccacttggcgccggaaccagcgctggatgaacttggcgcgcgccacgcggtccttgacgctctccacactctgccagcgcgcgctcaggcggcgcacgcgctgctgcgtctgctgctcgcggcggcgcgcggcgtcgtccagctgccccgcgagcgcgcgccgcgccctggccgcgcggtcgctctggtcggcgcgcacgagctccaccttctccgagatgaggtcggcgcgctgcttgcactggagttgaagctgctccagctgctcgtggcggcgcctggcggcctcgtccagcttcgaggcggaaaattggcgggtgcggcgcgtctcctcgtgccgcttcacgcgcatgcccctggccacgtcctgcgcgtgctgaacgcgcgcgcgcgcccgcgcggaaagttgccgcgtacgcacggcgcggacctcggcggcgcgcgcgatgcgggactgcagctgcgcctccaggtccgacgccgacgccggcgtgcagcacgcgagccgcgagcgcgcctcgaggcgcagctggcacttgctcttctgctggttcaccataatagagggcggtagcgctgcggccgacggcgcgagttcgagaatgaagttgggagaaacatgaagaggtgtgttcttaggtgggacgggggtcgtggaagattctctggcgtaaagtatgggaggaggaggggtgtcggcgaggagatggggctaggcgactcgcctcgaggtaaggaataatcagattttgatgtggggttggataggcatctgaagccaaagaagctgtgggtgtactttgttttgtcactatgaagctgtggcgtgggcttctgccagcgagaattgcactttgacgcggaggtttttgcctaaaggcatcatgactccgttctcactgggttggatggcaatgtcttggtcgccttttgccgccttctttttgaagtcctgcagcacctccatgagggtttcaaagttgcgtcgttcttggatggtggcgtgatacatgaggtagtcgcccactgacatgtcggaagtgtcgagctcggaagctgcgtctggagatactcgttcgggttgggagatctcggtagatttaggggaggttggtggcggaggttgagccgtcagcatttgtttaatctcggacttcgtatcgatggctggtggagctgtaactttaggcgtccggtggcattcattgacaaacctgcagcgtacatcatggaaaggttagaaagactggaaggtcaaactgtttaggattgtagcgacgtacacaaggaactcgtgatagtgcagacgcttcggtgagctgtttgtagaggaccgcaggaagagcgacgtgacctgtgctgcctcatccacggtcagcttcagaacagcagagcgaccttgaactgcgcgaagaaatgctggtgagatcaagaatgcttgcgtcagtgtgtgataatggagagatttatagttggggggtacatgtgcactacgtaccatcagttggaagtgctcctttcattgagccatgcagcttcttgtcgaacttctcgaatcgatgtagtagaaaccgcagccagtccgcagtggggaccgtaagctttgacagcaagttgagaacaagctgtttcaactcccgccgtccccgagagcactgcggattttgcccatagcgtctagcatcagaatcagcaccggctcgagtcaggcatgtttgggtgatagatactccacggaatgttgtgcttactgaagaaatgctgtgtagttgatctgattgtccgtcgagcggggaaagcgtgagagcatgccattcaagagctcggggtcaatatttattccgcacttgccaagtatacgcgggaactctgggcgaaggacaagcgttagtaactggtaaacctcacctccaaaacgaatctgcaagcgcaccttcttcaggtaacaatccagtgttctcgagatcaattccttctgcgatttcgagaaacctttcggcacctgtaaacacactccgaggggtatctccaacttggttagaacttggagtcgaaacgctgcgtgcggcaagtggagagcgaagaaactcggtgaggcgcttttcggctgttagaaagacggaccccaattgtgatgtttttgaagatgacggtggctttggccgttcatgctccgtgtcggattctgacagggagtcatcgctactcaagttgcaaatacgtcctaactggtaccgcaagaccaccaattagttgaaaagtgagggtctgggtgggaaaatgtacgcggattacctgctcgtagtcgagaacgtcttctgccttccctgtgctctgcgctcgcagttgttcaagcagcaactctcgttcgggtcgtgtcaatgggcactttaggcgctgaacgaactttttcatgaacacgtttgcgtccaagtagccatcacctgcaacatccaggcggtgaagggcgttctgaatcccgtggtacccgtcgctatcgtcgcccacaactccacggatgagtttgtggcgaacactctccatgagcagccgctgagattccaatcgctggtcaatccgcatccgagcttgctctcgctgttgaagcttcgtggggctacgaagttttcgcttcgatggagattgccgaccagactgttgctgctgttgctggagtatagggggttgctgaagagctttacagaatgctgtatagtcgaaacccttgttggcggtaggaaaacgcgccaaaagcttctcgacatcactgaattccacagcgaatgtacgattagccctcagtcatagaacaaacttgcaggtatcggggtcttacattttctttaaatccttcggggacagaaattcgcggagcaccgactcaagttcacttagaatgaaataaaaaacaagtttagctgcacagggaatgaccgtcacaaatgaagccatacgcgacgtacgcgacattcttcaattggcctttgccactcctgtcgatctcctggaaagcttggtaaacctcatccagttggtgctcatcatcgcctaaaaggacatgaagccgcagcaactggtgctcaatgggtttctccatgggtacgaaatagtgacaatgagctcaacaagcacgctgcgagtagataatttaagagtgaaactccagtttatacaatagtgcgccatcttataataatattctcaaacgtttaacttagtagttccgaccccctacctacggcaggacgttcttgcttgagctcacaagggacttgaacacaccgcccttaacttgcagcaacgccgacggcgtatcatactccaccacctcccctccatccagcaccaaaatcttgtcgctgtccatgatcgtctcgatgcggtgcgcgatgcacagcaccgtgcagtctccgccgccgaagctctccttcatcgtctgctggatgagcttgtccgactcctggtccacgttcgcggtggcttcgtccatcacgatcaccttgctgtctcggatcagcgcgcgagcgatacacagcaactgacgctgacccacagacaggttctcgcccttctcggctacctcgtagtcaagacctttgccccacccagccactgtatcggacaagtgcaccttgcggagcacttcatgcagctctgcgtcactcttctcagcgaaggggtcgaggttcattcgcagtgaaccactgaacagcatcgggtcctgcgggatgatggtcagcttggtccggagctggtgcacagtgatagtggagatgtccaccccgtcgatgagaacgcggccagtcgttggaatctccacgacgcggaacaaaacgctcatgagcgagctcttgccagacccagtgcgaccgcagatgccgaccttttcaccactcgcgacggagaaagatactccctttagtacgagagggaggtcgtcacggtatctcatggagacgttctcgaagacaaccgcaccagtccggggccagtcttctggcagagatttctgattagacgcagcccgatcgtgtccttcctcgttgagcgagccgtagtgggcgatgcgctcgaagcaggtcatgctgctctcaactcgagtcgaaagcgtggtcatccgctggaagctggacgacagttgagacgcgtacgtgagactgaggcctgccaccgcagcaccaacgctcgacttcgtagcaacggccagcaccgcgacaacgccaatgatgagcgacacgaaccagtctgctcgcatgtcgaaccacctcgccgccgtctgcgagaggaaataaatcttcatgttgttgttgagcagctcctcgcaacggacggcaaaagtgtccatcatcttgaacgcgcgcacggtctcgataccggagatcgtctcggacatcaagtttaagaacggtgacctggtgacaccatcgagacgcttcaattcccgagccgaggactggtaaaccttggccgcaaaccagcagccgtaccccaccgggcagtagatgatcagcacgaacgggttcaccgccgcacagacgatgaacgaggacagcacctgtaagacgcacagcagcagccatagagcccagtacggcagcgggttgtccacctcgtccaggtctctcgagaatcggttcaagatcctcccgatgggggtgatgtcgaagaaggtggtgatcggggccgctatcactttgcgcagatgcttcagatggattttcaccgagcaggtcatgcagatctccatgaagaagatgcagcgagcgaagaccaggagggcggcgcccacaacaacccccacgtagacggccagtgagttgtcctgactcaatgcgatggagccttgagaccactgactcaagaaccagtcagagaagaagagcgtgacctgagccacggagaacagcagtataatcgcaccgcagaggtaccagccattccactccgaggcggccaagtagtcgatgtacgtctgcagctgaaccgagccgacaagtcggtcctcttgggcgatcagctttccggatggctccttcttcgtgttggctttcttgtcaccaccaaccacgacgatagcttgcgatggcttgtcaacttgttcatgaagaatctcttcatcatagtgctgactcgcaatgttgcttcgagagcaacgcgaccgcggagagttcagtaaaaacgagaagtctgcttgcacttcagccaacggaccgtctcccacgatcttgccatcggacatcacgagtacacggtctgcgtactgcagcaaatggtagtgcgagttcaacaccaacaagcgcgtcttgccctgcgcgatgcccaccaagccatcggagaacacagcattagccacgtggacgtccagcgcactcagcggatcatccagcaccacgaagtcacatttgcgagcgcgatacatagcacgagccacgctgattcgagccttctgaccaccgctgagattgataccgcgctcgccgatttcagtctgatcgccatgctccagcatctcgaagtccgtggcgagctgacaagctgtaatcacactgaagtagtgctctgcatcaaatggttcgccaaagaggatgttgtcacgaacggtttggttttggatccatgcttgctggctcgcgtacgctacgtcgcctcggaccgtacgagtaccgtgaacttgttgcatttccccaagtatcgcgttcacgaggctggatttgccactgccgactgcaccgaccacgaccgtgagtgtccctggctggagcgtgagattgatgttgacaagtgtaggcgtcggtgcgtcttcctcccactggaaatcagcgtcttcgagtgaaacgattggtgaaccctcacacagtccaccttcgctggtgctgtgagcactttctccagcagcgaggaagtcggacaagcgactggtagaggtgacagcctctgcgaccgcgaccgatgcatcagcgaagatgctgaatggggtgcggcaagcgtttgtcagagccaaaatcacgaacgtcgtcgcgacatccagtctaccgccgagcaaaatggtagcggtgaagcacaccagattcagcaacgtcggcgccaagaacatgagcaccgtgttggcgagccgcagtcggttgtacttccgcagcagagcgatctccttttctcggatttcgtggatcagctcgttcacgaagccttcccacccgtataacttgacaactcgaatgccctgaagcatctcgttcgtcaccttcaggcggttggcactgatccgtgaaatctgtcgacggtagacgccaatctgcctcgacaggacaagcgctccctggataatgagcagcatcgctgccgacaccgcaaccgctacaatagcccccatctgagtgccgatgagaacgcagacagcaaccagcatcaacggggcgacgatgcaccacatccccaacttgtacgccgacaatacgcgatcgctgtcgaccccgatgaacgtgacgatctcccccgtgtccatggtacgtctcgcagtcgccgagagccgaagaatcttccggaaggcgctgttgatgacgatcatgcgggcgttgcaagccactcgagttgtgaggaactggcctgcactcaccgtcgtggcgccacagaaggcagcgcagcccagaagcaccgcgagtgcgtacccggaagagattccgagggagttctcttcgcccttcatgttgttgagaatggccttgatgatgaacggctggaacagcatcagccccgcactcgcgaggtgcagcacgaacgcgatcccccacgtccgcttcacgctctcccagatcgcgttgttcacgttcggccgcttcgcttgattcgcctgcgcggtgtgaaacctgtcgaacttctcctgcagtggacgcgcttggtcggcggtaggaagatcccagacacaagtctcgtccagcggagacgcgtagcctcgcttcaggaggggctggatccaccacatcgttgcgactgacagaagactggcagtgttgagcgggttttccttgttctggtgaacttcatcaaatgagacttcagtcggcactcgcttggcgttcctgctcgtcgagacggagaagtattggctgtccgtgctgtcatcagccgcctcagagatcgttgtcgtcgcagactcgaggatttcgttgcgcggagccatcacttcaggatctcaaaagtactcaaacttgaaacccgatgaactagtgcgagctttaagacgccggcaaattcagcagtgaagcgtgccatgctgcacgcgcgcacgcatggtatctgctggcagagatggtaatctctgccagcaggtaccttaactggtcacacgttttgcttgcgactgccaaggcagtaagatggaagttttcgtacagtgcaacagctaccgtcctaatgcccagagctccgtttcgaccgcacggtatctctgattgcactgttcccgtacgcgtagtatctgcagtcgttgggcgcttgcaggttgcgcctagggacagaccgacgtctgcaaagtgaaaaataatggatggtcaagttgtggtttgctgacgccctctactcagcaacaatgaaaaagaacccgatttcgccccccaggttttgtaacgtcttagcgatgagagccgatcacgcacgcgaccagcgtgtgcaacctgtggcgaccttgctcccagcctgtcctccagttagttcatggccattctcggcgctggaagtagccctgtcgaacactgatagtgaaacgtggcatgaaatctgaactcggcagtgttgccaacctgctatgctggatgccttcaatcgaaccaaacctgtggcggccacagaccttattgggccacagtgtggcccgataaagcctgagcgatcgtttgcatgtgctattagcagtgcttcaaaagtccgaacgctacgatagtttctggactcccgggtagtgtcggcttgtgcctggtggcaacaataactccctgtggtttcattcgcaactccacgacgctcggatgctctgaagtcgatgaagaagaagaagaagaagtggtcaatgcggagccagaaacctgggatgtggatgtgccatccacaacagaaaagaagaatggggacgaactagaccaatatcctatcaaatgtcgaatatctatcgaactcagtcccattttcgatgatgcctgatgtggttccgattgttgctagatggtagtctttcggtacgaaacgaacaacgaaaaatgcttgatgtcgccatcccgtcgcgtgtaacgtatccgagatcgattaagtcaagtaggctttcctgcaaagttggttctgcgaacactgagagcgaggagttttatctgaccactaacgccattctggtgcgacagcgtcttcagtagaatatcgaattgtgtacaaattcaacttcggttaactccggtaaaaagatcactaaagacaggatatcattccgcatctagaaaacatgttccagccccgcgtgccttcgcccaaggtcttgcgcagcagaagtggggaaaaccagaatggcagctcacaaaaaatagcgatggtaacctaagaacattacattacctacgaaaacgttgggaagctgagccaggtaggagattacttattatagaacgtcccaagttggagcatccagcccaacctcaggcaacttctatcgcgctgtgtgttgggcggctagacttactaattcgactccaactttttgaacgtcttagagtgtttaattgtcgtcgagaccatctacggtgcaagtgcaatgacaaccgtcgccccgcagctagaccgagtggccgactatggagatttaccttcttggagtactaaacttctcagtgcttggaagcagttgcagcttagctactttggcggcaagtattccattcatcgcgccatcgctctcgacgagtacaacaataaaacttctttagtgcatgtagttatggtgtgtattggcaccccattgcccatggttgctctggtcttcgcacaggagtcgatcccgcttcaagacccaagcgatggatggcgtgtgagctatggattgtggattcgagcggccattctcgtgtgtgttgtgatacaagcactgatgctccaggcaacataccttatcgaggggtttacaatatcgatgggtcagatattccttctctgcgtcattgtatcgggcggagtcgtcgccctagcaatgcttgtggcggagtacctggtgtttccaatcccgttcttcattttagccatgcttctcccgttctacctcgtgctatgtgtcacctttcgattcattctgggggcgagtgctattcgttttttactgtccaagcgcgatcaagtgatcagatttgctgtcatgatcgcttctcaaacgacaccggcagtcatttatcctgtgtacgagatgctgtttcgccgttcagaggggactcactaccagctccccgtcattttgcttcttccagttataaagatcgccttaaagaacatcgtgctacgatgctctgcagacctggaggatatggtgcccgagactgtgatctttacggtggactatttcaacgcgatctacatttcgacgtgcatgcagagtgcgtcatccgttgctgcagtttcagccatgataataacggatctactgcaaacaataattatgctgtacggattgcagcgccgtactatcgattgtgtctcaacttttcaccaggcggttggcctagtgacaacttgctggttatcctttgctggttatgtcgacaccagcaagggttcgagaggcaggattgtctcggtcttcgctggcgctcgtgcttacctcatcgagtttctgaagacggccaacgcgttctcgaccgactaggcacagtccccaacatgataaaagagtctcattcccagtctacacggactgttttggttggccccaagcatccgaatctacctcgacgcagtaagtcgtcagccccatctaccttccgtactattttcacgctgcggaaaagcctccgtacgatttttccaagctcattcattgtgcaagctcaaaacgataaagtattgcgcgatacgttggggatcttcttcatgacagagtgtcttgtcacaactgcgtacttggagacgttcgttcccttattttactgcagctacatgctcgtgatggttcatttccagagtgcccaatatcacactgagatggcacaagtcacaagtgaaaacgtaggatccactgtactccccgtgttcatgttcgggttactacaagtcgcttcgttttgggtgctggcagtggtgatcaaacggaattgcgggatgcgggcgctgtaccagctcgcgttcatgctggagacacagatggttttagtccagagcaaactcgtcttttgggtgattgtcatgctgtgcttcagaatcaagcacttcggtgagtacagtcaagatactctgcatttagcgtcaaaattgtattgcttacttctctgctcttactttcatcttgcaggggtggacttcacgtttcagtttctgcaattctaaatcataaaacctggtgcaaagtatcaaccactttttgattcaagggttatagtgcaagctcacaagatacgaagcagtcgcttcgaatgcaactaagctgggcacgatattaatcatcacagtacttgtcgagtcctgctacgtttgttgccgttcgagctcgcggcagctaattgatctggtgcactttgtacgcatttatatattccactattattattataataccactaaccactaataccactattaatagtggtaggaatgggctccgcagcttcatcacgcgcgctcgccggtaccatattggtactatcgttgccaagctgctcactggattgtgcgtgaagacattctgctgtgtcacagcctgtgtgcgcttctaacggaaatgaccgaataataccccgggcactatttattagtaccctcccattttcaaaacaaatatgctaaattatggatattacgcagtatttcatacataaacatgctttcgacaataaattcataaatatatacttgatctttgtatggaattaacattgtaaccctgggatacacattgggttacgttttagagggtactatacgggtaaggggtattattcgggaatttacgttattattttagctgttagcaaaattctggtgtaatacgtgtaggactccgaaaaccacacacgagcattttttatggatccgaagtgtattttggagtgttattatggcgtaaacttcacaaagcacaaggtcagagactgcgccggccaggagatcaccactacaaatcgggtgtgcaggagcggatccgtggcgctttgcagctcgcaggctgataaggccgctgctctcgaacgctagggcgtccgggcaggaacttcgagactcccttccttcgtggtccgggctcataccacacgcgcactccagggtatccatccgttactggcatgcgaccaaccattccgggcgtggcgcagaggtagagccgccatgccagtggtggtgtgctgttgttcttcctcaggcagagagccgacagctcccaggacgctgtgaacgatgaaggacgttgggaagtgcagttggagtatccctgcgcgaggcagacgctacacggttgatgcttatgttttgtggcatttttttccttattacagggcgggcttaccctttccttaatttacgctaagccacgcaggactagcaagcatcacacctgttcaagctatccaacgactttgcccgacttcacaagcgactggaacacgccgcccagcacttgcagcaacgccgccgaagctctccttcatcgtctgctggatgagcttgtccgactcctggtccacgttcgcggtggcttcgtccatcacgatcaccttgctgtctcggatcagcgcgcgagcgatacacagcaactgacgctgacccacagacaggttctcgcccttctcggctacctcgtagtcaagacctttgccccacccagccactgtatcggacaagtgcaccttgcggagcacttcatgcagctctgcgtcgctcttctcggcgaacgggtcgaggttcattcgaagtgaaccgctgaacagcatcgggtcctgtgggatgatggtcaatttcgtccggagctggtgcacagtgatagtggagatgtccacaccatcgatgagaacacggccagtcgttggaatttccacaacgcggaacaacacactcatcaaagagctcttgccagacccagtgcgaccgcagatgccgaccttctcaccactcgcgacggagaaagacactcccttcaatacaagcgggaggtcgtcacggtatctcatggagacgttctcgaagacgacacttcctgttcgaggccactcggctggaagagagtcagtgttgacggggaacgacctgctgccttcttcgtccagcgagttctcgcttgtagtatgcgatacgttcaaagcaggtcatgatctgctcgacttgcgtcgtcaaagttgtcatccgttggaagctggatgtgagttgagcagcgtacgtgaggcccaagcccgcgacggaagctccaagcgttcccttcatcccaatcgctagaattgcgacggctgcgatgatcacagagaccagccagtccgttcgcattgcgaaccacctagacgaggtctgatagagcagataatacttggagttctggtcgagaagccgttcgcaaagggccgagaagacctcagtcatcctgtacgctcgaatggtctcgatacctgacagcgtctccgagacaaggttcaagaacggggagcgagtggtgctgtcgaagcgcttcagctcgcgcgccgatgcctggtacactttaatcgcaaagaggaacgcccaaccaacgggcacgtagatgatcaacacgtacgggtcggccgcggcgcatacgatgaatgccgaggccatctgaaacatcatcaagagcatccacaacgcccagtacgggagggggttgcccacttggtcgagatcgcgagaaaagcgattcaggatgcggcccacgggcgtcacgtcgaagaaagtcgtgactggcgcgagaagaaccttcagcagatacttcgagtggagcttcccggagcacaccatgcagacttgcataaagtacgtacagcggatgaagaccagtacggctgatccaaccacgagtcctgcgtagatagcgagagagctcttggaagacagatcgaagttgcccttcgaccattgactcaagaaccagtcgcagaagaagagcgcaacttgcgccaccgtgaacagagcgaagatgacccccgccagcacgtatccattccattccgaagaagccaaatagtccacgtacgttttcagcttcactgaccccaccaaacggtcttctgccacgatgagtttgcccttagaagtagcgtctggggtgagttttgcgtccgctttggaggaggccgcggactttctctccgaggtttggtgctcttcgtcagcagtagcagtagcaatagcagtagcagtagccgtgtcctctaccggttcatccttctcgccggtcgcagtcaccaagagggggaattctttctccagctctaccaaagtgccgtcacccacgattcggccgtccgacatcaccaccacgcggtctgcgtactgcagcaaatgatagtgcgagttcaaaaccaacaatcgcgtcgttccctgcgcaatacccatcagaccatccgagaacaccgcgttcgccacgtgcacgtccagcgcgctcaaagggtcatccagcacgacgaaatcggacttacgagcccgatacatcgcgcgcgcgacgcccacgcgagctttctggctgccactgaggttgatcccgcgctcgccgatctctgtctgatctccgagctcgagcatctcgaagtccggtaataattggcatgctgcaacgacgcgattgtaatgctccgcatcgtacggctcgccgaagaggatgttgtcacgcacggttaggttctggatccaccttgttggctcgcgtacgcgacgttcccgtgcacagcgcgaactccccgtacttgttgcatctccccgaggatggcgttcacgaggctggacttgccgctccccactggaccgacaaccaccgtaagtgttgcgggccctagcttcaggttgatactcgacagcgtgggcgtcggtgcgtcttcctcccatcggaaatcggcattctcaattgaaatgattggcgcttcacccgtcgcgagctgcttcggggtgaagtcgtcttcaatttctccagaagtgaggaagtccgacagtcggcgcgtggacgtgatggcctcagcgacagccacggagctgttggcgaagatgctgaacggcatcttgcagcagttggtcagagcgagaatgacaaacgtggtcgagacgtcggggctgtttccctgcagcacgtacaccacaaagcacacgaggttgaggatcgtcgggccgaggaacatcaggatggcgttcgccagacgaaagtagttgtacgtgcgcatcagcgcgacttcctcgtcgtggatagcgcggatgacgtcgctgatggagcgttcccacgcgtagaacttgatcacccgaatgcccagcagaacttcgttcgtaagtttcacgcgattcgccccaatcttcgagatgcgtcgacggtagacgccaatgttccgggacgaggtgaaggccccccagaggatcccggcactcaccacagccactgcaagccccacgtacgcccccatttgagtactgaccaggatgcacacggcaatcaaaatgagaggggacatgatggtccacagtccgagtctgtaggcctccatgaccctctcgctgtcaactccagcgatcgtcacgacctccccgttgttcatcgtccgcctcgctgtggccgacagacgaaggagcttctggtacgcgctgttgatgacgaccatgcgcgcgttgcacccagccctcgcagtgagaaactgccccgaattgatcgctgtggccgcgcagaaggccacgcagccgagcaacacagctagagcgtagcccgaagagatgccgaagaggttgctctgcccctccatgttctgtaggatggccttgatcaggaacggctggatcagcaccaacaccgagttaaccgagtagcacgcgagagccgtcacgtacgtgtccttcgtagcctgccacaacgcgaagttgacgttcggtcgcttcggagtcgccttcttcttgtgggccttggtcttgatcttctcagcttccgccaagtacgctgcgtcgaagcgttcctgtagggggtgggccttgtccacctccgggaggtcccacacgctgtcttcgtccagggacgacttgtagccgcgcatcagcatcggctgcagccaccagatcgtcgcgatggacaagatgttggcagtgtccaaaggattgcggcgactctcgtccggtaccgacagggtcgaggtcgtgtcattgctcactcgaggcgtcttgacctcgcgatagctggcatcggactcattcaaccgaccttcggacggcatttggggctcaactgacgaatcgaactgagcaacgtgcggctctgctaagtgcaccccgtctcagatactttgggatccaagaggagtgttcgcgttcatcatatcgagcgctgtgaaggctcgtttctgattacatagcaaggagttcctagaatcttcaaaatctacaatgtattattattccagaacaccaacgactttgccggactccacaagcgactggaacacaccgcccttaacttgcagcaacgccgacggcgtatcatactccaccacctcccctccatccagcaccaaaatcttgtcgctgtccatgatcgtctcgatgcggtgcgcgatgcacagcaccgtgcagtctccgccgccgaagctctccttcatcgtctgctggatgagcttgtccgactcctggtccacgttcgcggtggcttcgtccatcacgatcaccttgctgtctcggatcagcgcgcgagcgatacacagcaactgacgctgacccacagacaggttctcgcccttctcggctacctcgtagtcaagacctttgccccacccagccactgtatcggacaagtgcaccttgcggagcacttcatgcagctctgcgtcactcttctcagcgaaggggtcgaggttcattcgcagtgaaccactgaacagcatcgggtcctgcgggatgatggtcagcttggtccggagctggtgcacagtgatagtggagatgtccaccccgtcgatgagaacgcggccagtcgttggaatctccacgacgcggaacaaaacgctcatgagcgagctcttgccagacccagtgcgaccgcagatgccgaccttttcaccactcgcgacggagaaagatactccctttagtacgagagggaggtcgtcacggtatctcatagagacgttctcgaagacaaccgcaccagtccggggccactccgcagctagcgagtccttgttgctggctacacgcgtgtatccttcttcatcgagagaggcgtagtgggcaatgcgttcgaagcaggtcatgatgttctccacctgagtcgtcaaggtggtcatgcgctggaagctggaggttagctgcgacgcgtacgtgaggcccaaacctgcaaccgcggctcccaaactggacttggtcgcaatcgctagaatcgccaccgcagcgataatcaccgacaccagccagtccgttcgcattgcaaaccaccgcgaggacgactggaacaagaggaagaacttggcgttgttgttcagcagctcttcgcagtgagcggagaactgctccaccattttgtaggaccgcaccgtctcaatgccagaaatcgtctccgacacgaggttcaagaacggagagcgggaggtactgtccaggcgcttgagctctcgcgcagaggactggtagatcctgattgcaaacatgaaggcgtagcccacagggatgtacaggatcagcacgtacgggtctgcagcggcgcacacgatgaatgccgatgacatctggaagatgtagagcatcatccacagactgaaatacggcagcgggttgtccacttggtccagatctcgcgagaatcggttcaggatccgacccaccggagtcacgtcgaagaacgtggtgactggggctcccagcaccttacggatgtagttgaagtgcagcttgcctgagcaccgcatgcagatctccatgtagtacacacagcggatgaacgtcaagatcaaagacgccacgacaatccccacgtagacagccatcgagttcttctgactgaggtctacagcgcccttggaccattgactcaagaaccagtcgcagaagaacagcgagacttgggcaactgtgaacaggatgaagatcgttgcggttaacacgtagccattccactccgacgcagccaggtagttgacgtacgttttcatcttcacagagccgactcgtcgatcctcctccgcgatcagcttcttaggcgtcttgctcttctttacgtcggctcctccttcgtcctttgttaacgcagcttcaatcgtacgctgcttcccttcattcttcacttctccttgctctgtgtcttccgaagcatcagttattttgcctcgtggtgaggtcgcaaggaaggagaactcgcctctaagctgctccagagtgccatcgccaacgatctgtccatccgacatcaccaacacccgatctgcgtactgcaacaagtggtaatgcgagttcaaaaccagtaatcgcgtcgttccctgtgcaatacccatcagaccatccgagaacaccgcgttcgccacgtgcacgtccaaagcgctcaacgggtcgtccagcaccacgaagtcaaagttacgagcgcggtacatggctcgagcgataccgacgcgagccttctggccgccgctgaggttgatgccacgctctccaatctccgtctggtcgccttgctccagcatctcaaagtccggtagcaattgacacgctgtgaccacgcgactgtaatgatccgcgtcgtacgactcgccgaagaggatgttgtcacgcacggctaggttctggatccaggcctgctgactcgcgtacgccacgtcgccgcgcacttcccgcgttccacgcagttggtgcatttcaccgaggatggcattgacgaggctggatttgccgctgccgacgggcccgaccacgactgtgagcgttccagttttgagcgtgaacgtgatgttcgagagcgttggagctggcgtatcctcgacccactggaagtctgcgtcttggaaggatacgacggctttgtcgtgctccagattgagttcgtgcgtgcgttcttccacttcccctgacaccaagaagtccgataggcggccggttgaggtgatcgcctccgacacagccaccgaagcgttcgcgaagatactgaaggccatcttgcacgagtttgtgagtgcgaggatcacaaacgccgtcgccacgtccagggtgttgcccagcaggatgtacacgagaaagcagaccatgttcaggatcgtgggcgccaggaacatgagcacggcgttggtcagccgcaagtagttgtagctccgcatgagcgccacctcttcgtctcgaatcttccggatggtctcgttaatggagttctcccaggcgtaaaacttgatcacgcggatgcccagcagcacctcattcgtgagtttcactcggttggcgctgatcttggagatccgccgcctgtagatcccaatgtgcttggacgtcatgaaggctccgtacatgatggcgacgctcgtgacagcgaccgccagccccacgtagacccccatctgcgtcccgatcaagatgcacaccgcgaccaggataataggcgagatgatgcaccacaacccaatagtatacgcctccatgacgcgctcgctatcaacccccgccagcgtcacgacctctccgctgttcatcgtgcgtctcgccgtcgcactgagtctcaatatcttctggaagacgctgttgatcaccaccatgcgggcgttgcagcccgctctcgcagtcaggaactgggccgaattgatcgctgtggcgccgcagaaggccacgcagcccagaaacacggccagaccgtagcccgacgagatgccgaacaagttgctctcgtcctcgaggttctcaaggatggccttgatcaggaacggctgcagcagagtgagcgtggcgctgaccatgtagagcgccgtggccaccgcgatcttgtccttggtggcttcccacagcgccacgttgacgttcgggcgtttctgtttcttcttgttctttaacttgagttcttgtttggtccatgagtcatcgaatcgtccttgcagacgacgagattggtccttcttgggtaaatcccacacgctgtcttcagttaacggggacttgtacccacgccagagcagcggctgcagccaccagatcgtcgcgaccgacagcaaattggccgagtccagcggactcgccttgtcctcttcaggctgcggcgttccgtcatcagcgcgctgggtggtcgtggacgccccgcgcggactccggagctcgtggaaggcagcggacgccgcgtccggctccgcctccgcggcgcggtgctgtgggggcatgtatctgcggcagtatctgtctccctatgtccaagcctacacttgagcccctggagggttctgggaaagtgaggagctcccccatgctccccatcgtctaacgttgcggggtgtgccactattcaaagccttgtttgtgcgccgtaaaacaccagtcgaacacaaggcgcctgcctcaagtgcacgacggcaacgaaggcaaaagcactggctccgccttgcccatccatacctggagccaaaagagaggaattgcagcggcggcgagtgcgtgttaaagttgaccagcacctcgagaaaaatgtttcgagaagggaaaaaggacaactggaccatcttgaagtgttacaggaataaagaaacaataaaaggtgggcgatttgggcacgcgtgcatcggcctacttcgctgcacgtgtcgaggcggtcgccaatagatgctgctcacagctttggtcgagggtgggtatctctgttactcagacatggagctcgacgatagggacgaggtgatgctagcgaccgaaatggtctgcttgccgaagcccgtggcgtactcctgcgcgatctccacgggactcatctgtcgcacctgctgcagacagcggccgcagaatgtcaccttgtgctggtccaggaagccggcgacgccgacgatcgcgaccttccgttggactcggcacgaacggcacaagtagcctccacacagtttgcacgagtgtccctgcttggttataccattggttttggagatggaggccgtgcacgtgacgcacgctggagggcggtggggtcgaactccggactctttgatagcagcgtggcgcttccgcagcagccacgtgatcttcttcatctcgctgcagtgagcgtacttgagaatggtcaggtatcccgtcgtcatactgggcaccacgagcgtcttgatcatgtctcctgccgggtccacgatgccggagccgtacgcctcgacgaggtcggggccgatctgtcggaagatgccgcacacagtcatgttcgctcgcacgcggcctggcagatccccggtctgcgggaagttgaccgagtggtagatctggcagccgatgcgctccccattagacaagcgcaccatgttcatgtactcgacgtagacgtagtcgcggttcttgatcagtggcgtcgacgcgaacggcaggtcgagctcgatccaccgaacattcagcgaccggaagggctcctccgcggtgggcttctcgagcaccgccagcaccgagccaccactcatatccttgacgtacgatgccttaacacgcatcgcttcggtagtcgtagccaccgcaccgaacatgcaatcgtcgacggtgccccacgtggttcccgtcatcaacagcgccgggtagtcggtcgtcttggagcccatctgagactcgcgcacgacggggttccgctccacgtacacacgcgtaccctccttggacttcatgtacttccactcgcgctcatcgactttggggcccccgtgcgcgataaagtcctcgtatttgctcacctgctggtcgaaaaagttgtaggcgaagtccttgagcgcgaccttgtcggcgtccgacaggatcaggtcgccgaacggactcgggatgaagcgctccttgaccatggccgagagttgtgtaatgtgaggttgccgagactcgggcacagcgcgaaagcctgaggatcgacaagtgatctcgaccttgacgtcagctgaacgcgggaggggtgggctgcccgccgcggttatcatggtcgtgtcaggacctcaggccctgtcttttgccgtacaaatccccattttgacttggaaattagaagtcgagcgaggcccagaagctggcaaaagcttaaacttacaaataataagttacacgagcaggtggcgctgcacacacccccacagcagggaggttcgcccccttctttagcgctgaggtggcgccggctgaaggcgataagaccgcaggagaggagactggagttgcgcagtcaaacttgaccatatgaaagacttgttgcacttgttcctggagtcaccccccgggtgagttggagatccttttctctctctcctgggtatgatgtcatgacaggaccttctttgaggctgcggagcgcacggaggatttgaacgctggcaacgacgcgcagagtacggagaatcgcggcgttgagctgagctcgagctttgtttcgagtttttttcggtgcagacccgtctttcgaattgaaggtgcgccggcgcaagggctttctctggggatcccgaggctccgcaccaccaatgccgctgcgtggctctgcatcggcaaagggacgggtttcctacgaactccaatggaagacaaacgatctatccatcatagatgccatgctggtgcatgaagtatctgtactgtaaaccatacgctggaaatgtagaggcacgaggggtagcaacttcaacgttcgcctcacacttacaattgcatcatgttttttttagtgcggtgcacgctatgattcatgctctttcgtaagacgatacttagccccagagagcctaccgtaagacaaagcgtcttatgttttgcaatcaacgcattttggctacatcttcgttttagtataccagtggctccattgtattttgtccgtcaaaacgtaagacagtttgtcggacaacaatttgcaccatgcgattggccaaaactttcagagggtagtgtcgttgcgtgcgttcctccgttgagccccgaggacaaccgctttgccgtttttgaattgctcgtgccacctacagtcgagccggcgctcacaagcacgaacatgtagtcggtagtgcggccctactgccaactacaatgtacacgcttgtttgagaatggttaagaaattaatgcacccgaaccatcagcccagcttgacaaacaaaacgttcagggctttatagtgaattctagttaatgcataaccaaatagagcccctcttcctccggtagtgcggcccacgaaccctgtcgtgtcctctgaggacgcctccgagcgaagcagtgcacgacgagcgcgcacacatgctccgcaccgaggcgttgtcggaggacgcgagggagtagacaatcaatacattatgggatcttaccaaagtcatgaaatgaactgttttgtagtagcaacaaggcagcgtcagccagtcttggtatttgtatttgtatttgtatttgtatttgtatttgttgcggtttgcttggctaccttactcccggaggcgcacactgctgcagctccacctacgtcggtagtggacaccaccgacctcacccgcggccacgtgtaggtaagctgttggtggtgtcgcaaacaaataactacaaaacgacgtgagggcctctaagagtcaaatgagcggcgaaacttctcgggaatacatgaaaaatgccaaagctaaagtaattgatcagcccggctgaaggcgcttaccagtttgctcggtctgctactgtagtactaggaaatctaaacgatctaagctcgccgtggtgttttaaatatgtagagggagtttgttggtgtcgcagcgctcctccgcacagttctgtcgaaccgccaatcattactaccactactatgctgcgcccgatattagtcaggatacgaagtgcaacgaaatgcatcaaaaagagtagcgaagaggaacgcgggccttcctagcagagcctgcgagcactctgcgcctggcagtgccaacagaattggcaagtcgtactattcgccaatcaaatcactagatttggtttgtcgtcaaactgtcttacgaatgctcgacacaagtgagtgtcgtgctgtcagcactagggtcccaagttgggacgcctcgaacctgtagccggaaaccagggtccttccacgggcttcaacattccccgctcaaatgggagcaaggccgcgagcaggcgttgcagcaatcggtagcagaattgagaccgtacataccggtacgttgtgccacggataattactgtgtagcgccggggggggggggcaagagcaaaataaggaagatgccattgctgtcgtattgctcctccctgggctcccgagggaggattcctcccagggaggccaacgatccggagatccttggaggcgacccctgacacttctccgcgacccgtcaaattttggaatctgacaacgataggtaatcgtctataactaaggctctactccattgagtcagctgaatacattacattgcattattttctgttatgtacaatgcaatcccatcgagcttatactaccgtagtaggcatcggcaaccacttgtgtttccagagatcgacgagaaaaatgcactacaaaccagtctgcctctcaatcggacatcgtgctggcgtaagacgagtcgatgtgacagtaagaagacaattgcttgcagatgcccgcggcgtgttctctcgccacctctagcgggctcatgctcctcacctgctgaaggcacagtccgcaaaaagagaccttccgcatctgcagctgcatgtcggaagcgacgaagcacaacttgcgctggatccggcaggaccgacataggtagcccacgcaaagcttgcaggtactgctttctcccttgccatagtcgccgattcgaagcttggaaataggagccgtgcacgtaacgcagacgcttgctcgagtcggggtgcccagttccttggccatctcgtagcgcttggccaacatccacgacatcttcttcatcttgctgcagtgggcgtacttgagcgtcgacaggtaaccggtggcaatgctcggcatcacgagggacttgatcatttcgccaccagcgtcgacaatacccgacccgtacaagtcaatggtgtcgtttccaatctggcggaagatcgtgcagacggtgatattggcgcgcactcgagcggggagcttcttcgtctgcgggaagtcgaccgagtggaagatcatgacgccaacacgttcaccgttcgaaagccgaaccatcttcgtgcactctaggtaaacgtagtcgcggttcttgacgagcgaggtcgctgcgaacgggagatcgatctccatccacttgacgttcatggagttgaacggctcatccacggtgggctcctcgagagaggccagaactgcgccaccgctcatgtcctccacataggacgccttgatccgcatggactcgagcgtcgggttcacagccccgaacatgcagtcgtcgacggttccccaagtaattcctgtcagaagaaactccgggtggtcggtcttcactccgtctggggttgtccggatcatcgggtcgcgttcaaggtacactcgagcatcgtccttggtcttgatcagcttccacttcttctggtccaccttggtgcggtcaccgccgatgaaagcctcgtacttcacgatgttttggtcaatgaaattcaacgcgaagtccttgaggccctgtctgtctgcttccgtgaggttgaggtctccgaacgggttgacgacgaagcggtctttgcccatggctggtcggtctaactgatcgtgtaagtccgattcgggcgaacgggtacttgctggggtggggtaccagcaaattggagactgcgctgtcggtaagccaccagagagctgccattcattcactggttgcgcgaggatagagcctaccccgctcggtctcgtgtctgatccggatactatagtacttgcacggccaggagctgtgatagaactcttggtctcaagagagcgtcggtatcgttggattgggttttcaaggtacgtctgttatgaatttacatgtggcggcattaccgaggaatgcttgggctaaatatctagcacatgcgttcttacttaagtatacgaggagctcgatgggcttcagctccggtcgcgagtcaggatgccacgtcgtgcattttaatgtttaaaaaaaaacggatggacgcaacttcaaaaggccctggcggtgaggacaaatattggacacttgtgccttgtttgtaggtacagcataagtacctgtagtcggttggctggagaagtcgtgcactcgtcgcaaaccattgcgtctgtggaccgtacggtagtgtaatgcgtgtgtggacgcatctgcagtggacgttggagctcaagcgtagggacaaccgcctgctagtctctccgtatagagtcagctaatgcattggtgccgggtcggagatactttccttagtctgacatttgccgcctgcctcaagtggacgggggtaggcgcttgttaaaccacccaccagccgcattttcgcacgcttcaaccaacttcgtcacgagcgcgaaagaattctaccgacaattgatttggggtggggtgtttaggatgtggggccagggtgacgaaactggtgaccttgctcagacaagcaaacgtgaggcaacaaccaccaccgacctcacctgctgatctctgctttctctgccccctgcacgagccgacgagtgcaacgtggcaacgtcatgctggcgtagcgcataaatcgatttgttgttgatcgcttggtacacgtgtgcaagttgttgtaccgagtaaaagcttatgcacaaggtcagagtaaatgctcggccaagctgcgttggtggaagcataaagcccttacagtagtgatgaactcgggtttacatggggataaggacgccgaaaaacgccatcctcttcagctccatgctgcgttagcgacagcagcttgaagcctctcataagtcgcaactgagctgaggtgagtcagtctggcggggccatgcttgaggaagcaaccactctcttttctctctctggaattggaacgccagagatttcgttagcgctcctgccaagttatcaggtttggaggataagaaagcgagtatgcatcccaacagaggacgcggcatccgacttaagagtgcgagcaatgataccgatgacaacaaacttcagttcccgatttacccgccggtaacgcccccactgagaccatccaacttccggccaggtcataatgggcaagaaccgcttcgttgtcaatcccttcgggcacctcgctctgtccgaagtcgaccggtcccagcttaaggaattcgcctacaacttcttcgatcagtgcgtgctcaagtacgaagttttcatcagcgatggtggtcccaaggtcgacccgaaagactggaagcatatcaagacgagagaggatacgcgtgtctacctcgagcgcgatccaccgattcgaacgtcactctccggtgtggtatcggatcacccagcgctgctgatgacggggataacctggggcaccgtcgacgactgcatgttcggcgcatacagcccaactctcgagaccatgcgagtcaaggcctcgtacgtcgaagacatgagcggtggcgccgtcctggctgtgctggaagaaccaacgccagaagacccattccgatccatgacgatcaagtggatcgagcttgacctccccttcaactcgaccactctcgtcaagaatcgcgactacgtgtacatcgagtacatgaaaaccgtcaagctgtcgaatggtgaacacattggctgccagatctaccattcgatcaacttcccacagacaaaggaacttccgaaccgtgtgcgcgcgaacatgacggtgtgtggcatctttcgccagctcgggcccgacaccgtcgaggtctacggctcaggaattgttgaccctgcgggtgacatgatcaaggcactcgttgtacccagcatggccgccggctacctgaccgtgctgaagtacgcccactgcagcaagatgaagaagatatcctggctcctggggaagcgctacgaattggccaaggagttgggagccccaggtagagcccacatttgtgtcacgtgctgcacaccaatctcgaaacttcggcgcggagactacggcagaagcgagggcagcacgtgcaagctctgttctggttatctgtgccgctcatgtcgtatccagcgaaagttgacattcaccagccccgaccttcagatggagcagcgcaaggtgtcgttctgcggtctctgtctgcagcaagccagaaccatgagtcccttggaggtgatcaaggatctcatgaattccccagacaaggataaacacctgacagcgacctcttccacggccatcgactcatcttactcaacgtcgtccgagtactgccactcggaatacagtggctagtcgatcgattccgtatacctgcaggagtttcgtgatgagttgagttcaataagtaaagatggcgaataaagtgtaaccttgtgcttcatacgttcgctctcacaccataatcctctgcaaacattggaacactccaacgacatatcacagcatcttacacctccttctccggctcagccttcgccgcgtcaagagctcccttggtgacgtctttgtagcagtgcgggtgcgtgcgctcatactgagccctcatccacccgagcgtctcgtccgactgctggttgagactctgcctgccagcttccgagaggcgcacggtgtctttcgccgtggtgacagcctgcttcgccagctcccactccagctcgttctcctcctgcttgtgtcccagcagcacgagcgccttgtaaaaacccttgacctcctcctccttgccgcgctcgatgtcgatcttgaacttggtctccccgaccttgaactggagctcgcagtcgcggtcgacgacgcctgtggactcgaacttcacgttctccactctgtggttcttgtactcatacctctccaccagcttacgcgtcgtcgtggacgtctcggcgctcacggtgattagcgcgcgtcgtgaaggcgaactcctggcgcaccgactgcagcgcgtacacgatctcctcctcgggcagaacgtacgacgccgcccacgcgcccgacaggtccgagaccacgtcgcagatgtccgtcgtgcccgcgatgtcggacgccaggcccttgatcgccgagttggtgttgcccatattgcgctgcggaatccaaagtgagagcggaaatctcaattttcaatggatacagttgaagtgcaccctcattgagcaacttactatgtaatactccacacaaaccctcatttagcaaaggcaactatagttttgacatggattcaacagctcctgcctatggatacaacctacttcttgccctcggcgacagtctgagccattgcgccggtgataacttcgcgatagcagcgaggattgcgctggttgaaggcgttttcgagccattcggcggccgacgtcgcttgggacacgaggtcgtgcccggcagagatcttcaagctgtccgcggcttcgtccagccccttctcggcttgcccccagctgcgagagcgcgacttttgctctcgggcgagcagcagcagcgtcttgtagaagcccttgacgaactcctcttccttgcgggcgatgtcgatggacacgtcgaactcgccgatgtggaacttgatctcgcagtcgcggtccacgcgccccgttgtctcgaagagcacgccggagatggggcagtctcggtacgtggcgcgctgcacgagcttgcgcgttgtggtggcgttctcgcccaccgtcatgatcagcgcctcgttggtgaaggcgaactcctctttggccgactcgaacgcgaacaggatgtcctcgcccgggagcaggtacgacgccgcgtgtagcttgccgaagtccttggcggtgttgcagatgtccgcggagcccgtgaggtctttggtcaggcccttgaacatggtagggagcgatctgcggtggttggtgaacaggcgcgccaaagagacaatgacagaggcgggccggaactgccatcactgatgccgcatcagcgatgaaaatccatcgagctggaagtgctctctgtctgcagccgcacagacaaagacctcttcgttaaatggatacactctgcatttttgcactcgagcggacatgggcccgtaccgcggcgctggatttcgtgagccagacggatgcagttcaacctgttgcagtgcccgcattagtcgattgtccctcacaacgcggctataactcgaccattgtgggtgccgcgcctgtcgatgtagcgtttccgacttgcaggagctcacttcccaattgaccaagctcctcgcactcactctcctcaaccgaagaagaccatgttgaagggccttaccggagacttgtccggcgctggcgacgtgtgccacgtcatgcgcgacttctcgcagtgcctggccatgcagtacttgctgccgggcgagggcatcatgttctccatgcagtccacgaaggaggagttcacgttcactaaccacgcgctgctcaagatcgccggcaacaactcgaccaccacgcgcaagctcacggagcgctacgactaccgccacgagaccatcacggccgtcaagttcgagacggcgggactcgtggaccgcgattgcgagatcaagttcaagatcggcggcaagtcgatgtccatcgacgtcgccaaggccgagcaggcggacgcacaggacttttacaaggtgctggagatgctcagccgccggcagcttgagaacaatcgcgcgtgggagcacggctgtctggcgctcaagtactcgagtgaggcgctgtatctcaccgagaacagcggccagacactgacgaagcagagcgacgaagctgcctcctgggttggtgagctctacaaacgcacgcacccgctgtgctacagagaattcatcaccagcgcgttccaggagctccggctcatcgacaaaatggagcgcttccagatacaaaagtagagacccaacacccacgtatgaaccaaaccgcgacaacgccatcaaatgcgcagtagagaccttgccactttcctggttctcagcagctcgtgcttcatttcatgcagcttcggtaccttgttgctgtgtactccacggtttgctgtttacgtgacaaacactctcgtccaacttcaactgtagccattcttgatgtacagcaagagccctgctgcaagacaaggctggagctgcgcctcgcgctgttgaatagagccacaaaacttgtgaaaccgggcgagctcagaggtcttgctctgactcaggggcgctgatcattgctcagtgagcaatcatggacggatgcgaaggccaactcatgggtgcgaggccaactcgtggtcacagagaaccaaaacttcagactgatccctccgtacatttcccgatctctcgagatggatgcagtacagtatcgttacctgtaactacactgcgtcgctcgtgtatcaagcagcgtcaagggcgctcctggacggatctacataaatacatacgcagctccaccttcgagtccaaggctcggaatgatccattttggatatgcgactaaaaccgtgggatgcagcagtgggaaggccgtgagatagtgcgctgcttaccgcgcatctggcgagcgatgtgtcgatcgttgtttgagcgcagcgttggtctccgctgctggcaaacaaaggagccgcagcacctggtgcttgcatacgcgtgtcgtatcctacctgtacgacggcgccttttacaggagccagcggcccagaccggagaggcaaatgataccgacctggtccgcgcatcgccgatgcgaaaactggcgtggagttccagcgcccattgaaggcgccatggatgtgcttatcttctgattgcggcaaagctcatcaccgcaaaaaataggtttgatgcgacgaagagcgcagcgtcacgcgcgcctccaacgcgcggtgctgcctcgactcgccgacattttgcaatgcggcacgttggaggtgtcgtgctgcgctgccaggcgatgtaagtcgcgcctgctgcactgttaacatcagccttcacagcgtcatattttctgatactatgacaaacatatgcttcccggcaggtatatcgcttctgtcaggatgtatccatctctacatgatcacaaacctgctaaacccaactagttgtcaaatcgtattaagcaggtattaactatcgtagtctatggatgtcgcatctatgcaccaaaatagcgctccgccttctctcagcccgacaacagaggcaacaaacaaccaacaacccaacacctcgccatcggccagctgccccaacgcctggagtgcgcactcccgattcgtcccgaataactcgctcgcccacagtagcatggcgccgccgcccgcggacgaggatggcggcacccccacggccccgtacgcgctgctgcagccggcgccggcgtcgcccttcctggacgagatcgacgccgacagcatcctgggcagcgacgtggtggacgtccacgtggaggacgcgacggacgtcggggaggacactctgagccagatcccggaggccaccaagcccgcagagggggggccaaagcaagacggggaggaggacgtagccgagtaccgctacgtccacctgaacgcgcccgagaagaacgcggcgctgggctactgcagcaacctggtcatcacgagccgcttcacgctgtacaacttcctgcccaagctgctcttctacgagttcagcaagctggccaacgcctacttcctcgtcatctccgtcatgcagaccatcaagcccatctccaacacgggcggcttcccggcctcgctgccggcgctctccatcatcgtgctcatcgacatgttcttcgcctgcatggaggactacaagcgccacaaggccgaccacatcgccaacaacatgccctgccagcgattcaaccgagacgcgagggccttcgagccggccacgtggcacacgctgcaggtcggagacgtggtcaaagtggccaaccgagaccccgtcccggctgatctggtgatcctcggagcctgcgagccggacccgaccaaccccgcgggcatttgctacgtcgagaccaagtcgctggatggagagacgaatctgaagctgagacagggacttgaggccacctacacggcgctgctcagtgacgcggccgtgggggacctcaaggggacggtggtgtgcgagacgcctaacaactccatccaccgcttcagcggctccatgacgctcgagggaggcaagaaggaggtcatcacgaccaacgccattgcgctgcgcggctcgacgctgcggaataccgagtacatttacggtctggtcgtgaacacgggcccggacaccaagatcatgatggcctcgtcgtccgagcccatgaagtggagcaacatggagaggcgcctgaacaagcagatcctgtacatttgtatgctcatggtggcgctgtgcctgaccggcgccatcttgtcgacagtttggaacacttcgaatctggacaaggactcgcacaagggcgcgtggtatttgtacgacggcaattcaacggcggtcaagtcaccggtggggaactttgtgatcatggtgctgtactacttcctgctgctgaactcgttcatccccgtgtcgctgtacgtcagtatgacgtccgtgaagttcatgcagtcgtacttcatgaacaacgatttggagatgtatcacgaggagacggacacgccgtgccaggtgcgcaccatgtctttgaacgaggagttgggacagatcgactacatcttctcggacaagacgggcacgctgacgtgcaacatcatggagttccgcaagtgctcgattaatggtgtggcgtatggattgggtgaaacagaggttggcattgccgcgcgtaagcgccaacaggaagaggctccaacgacgtcttcgttctacgctgtgacccccggcggtggctatgcagctccaatgaggaaagaccgtgttgacactgcgccggattcaaacaacccgcctacggaccgtatcgtgaaggcgccgttcgttaactatcaggatgacgctctcttcgatgccttggcacagaagaacacctctcaggctaaagctattggatcatttttcgagcacctggctgtatgccacactgtcatgcctgagcgagccccggacaacagtcttcgcttgagcgcatcgtcacctgatgaacaagcgctcgtagctgcggctgcttgctttggctacaaattcgtggcgcgtggtcccggtaaggcaatggtggagtacttttcatgcgtggaccaccccgaagacatggtttgcaaccagccagtcgcgggccacgctgtcggcacttacgaggtcctggaagtgctcgagtttaacagtacgcgcaagcgtatgtccgttgtcgtaaagggcccaggtggtgaattaaaactattctgcaagggagcagacactgttatgtacgagcgcctgagaccgaccaacgacccttccgtcaagcaaacgcgcaatttgacactacaacacatggagcagttcgcatctgagggactgcgtactttagtgatcggtacgaccgacattgaccgcgagttcttcgagtcatgggtcatccgctaccgcacagctatcaatgatatgcgccagattgatcttcgtcgcaatggcgaggacaacgatatcgaccggcttatggaggaaattgaggtgaaccttgatatcttgggcgccacagctatcgaggaccgactgcaagctgaagtgcccgacactatttacaagttgcgccaagcgtccatcaagatctggatgcttacgggcgataaggaggagacggctatcaacatcggcttcgcttgtcgcctgctagcttcagacattgagcgggtcgtgatttctgcagatacacacccggacttggcttctattgtagatgaactggaagcatacagccgtgaagatgaaaatgaggacacttctgcatcgacgcccgctggaggcctcgctactatgtcggtgacgtctgatattcgaaactcctcggtctcgataagaaaccagcgcaaacgaatgactcgcatcgagagtatggcggagatgccgcagcaagatctagctttggtcattgatggcgagacgttggagctggcgctggaagaatgccccgaattgctactgaaggtagctgaaaagtgtgtggcagtgattgcatgccgcgtgtctcctgcccagaaggcgcagctggtgcgtcttgtgcgcgataacaacccagaagtccgaacgctggctatcggtgacggcgctaatgacgtctcgatgattcaagctgcacacgtcggtgttggtatctcgggccaagagggaatgcaggccgcgaattcgtcggactatgccatcgcgcagttccgcttcctgtcgaggctattacttgttcacggtcgctggaattatgtccgcatgggcaagcttatcctgtacatcttctacaagaatgtcattctgaacttgacgcagttctggtacatgatctacacgggctactcgggacagaagttcttcctcgaatggggactccagggctacaacctgctcttcacggctttgccgatcgtcctggtgagcaccttcgagcaggatgtgcctgcgtgcctcgcgcacaactacccgctgctttaccgaatcggccaggagaacacaaacttcaacacgaaggtcgtgtgggcctggatcacgtcgtgtgtgtgggagtcgctcatcatctgcttcggcgtcgtgtacggcatgcgttatttggttactggaggagacacacccacgatgtgggtttacggatgtacatcgttcacgattgtgctgatcgtggtgacgctgaaactttgtctgcaccagcagatgtggtggccaatccacatcgccatctacatcggatctttcatgctttggatcggcacagctgccttcatttcccacggcaggtccatcagctcgtcctactggaatggagtgttctcgaacacgttccgcattgatgcgttttggctggtggtgccgctgctcgtcgtcgcagcgctgtcacgtgacttcatgtggaagggctacatgcggatgttcaggccatcgtacaagcacctggcacaagaagtgtgtgcctttaacctcacacatatcgcggatcaactactcacgttcccgccagcagagaagatcccggaggacgcttatggcggcgaggctggtcgcgtcgccgctggttctgtcctgacgtcgagcatgcgcgatacaactgtgagcaagcccgtcgcccctgcagtcgtcatggcgccgcgtccgctcattggacgtcttggaagccgccgctcaactacaagaggcagcgccttcagctacgacgccgagagcgttatggtggagtcgttcatgtccacggacaggtacgcacgcgacgctaagagaaccaagtccatcttcgaccgccacgcaagccgcggctcgttggcgttccaccgcctgccgtccgactccgatggagatctcgagggactggcggaaagcacccgtcccacgcaaacgcgttccggacgagcagccacgactgcggatgtatccccacgacgatcagctggcaacattttccgcggagcccgtcacggtcaaggacgaagacgtttcttctcggtgtcggcgctctcgggtgatacagcgtcaggtcgagcacgcgagaacgccaccgtcaacgcaggaggtcgagctcggccaccggcgttgaatcctctggctgagaacgtgaccgtgagcgacgccgactcggacggactgcgcagcttccatcgcccgtcgaccagccgtctgaggactcggggcttcgaaaaccgcgccatgtccaacgacgatgtgtcgtatcacgcccacggcgacagtaccagcgtaccgcgctctcctctcgtgcgacgctacacgaaccgaagcatagtatcgaatatgtaaggcagacgatggataggaaacaacaactaaatacataaaaacactttgaacagctggagttgaagttggacgagagtgattgtcatccgcctccaagacccgagctcaccatggccacgaatcccacacccgcgaagtgcagcaggacgtcgcccatccaggtgtcgttcacgctgcccagcacccagcagccggacgatagtgcggccgccagcgacgacctcgagcggcagaagctccaactggagcgagagcgtctccaaatggagagggagaagctccaaatgcagaaagagaagcaccagatgactgcgcaagaccaaactgcagaaacggtaggccgagacggcgctggccaaagctacgatggcggcgaccaagatcgggacgtacaggcagctgatgaaaagcggcgtgtctagcgagaagatcaccgatctctacgaggcctttgaagagatcgaggaggcctgagctcaagttatcgagaggccactacttacgtgatcagcccccaattattgtcttagtggtaaaggtcttttaacttttctttttgtcaatgagggatcgcatgactggtactgtgctgtggcgactattttgaacaggcagagtcgatgggcgcgaaactgcgttcacgttcttgaccagcagagcgagatcgccccaaattatcctcaaatcgacctgcgatgggtccacacgttttcgacgtggatgaggcattgggggctattattgcagcccacgtgagcagcaaggaacgcgtctcagtttatcttgcaccttacttgtgcgagcggagagggaggccatggcgtcgatagccaaggtgcaagtgaagcaagctcaaggcagcgatcagcaagcaagacactcatgggtgccaggggtctcaactcaagccgcctcggcacgttctcagccagctgctcgcgaaagcctgtacttggtggggccaagagccaagaagaagctgataagaggacacattttcaacctcgttcgacgcctcgtgctcatcgctgctgctatccagtacatcatcatttccatggaagcctcgtggagcacgattcaagcattgaaaggcgcacacaatccacccgagtcattccgagtgttcacagcgacacttatctccggctacgtcggcaaaggtctcattagagatagcccgctggtgcaaaaggtgctagctggagacacaactcctcgagactccgctttgtttctcaactcgaagaatgagacgtcgttccagaattgcacgggcttgccaaaattcaatcccgcaatctacaactacgagtacctgagcaacgcgtaccgccagatggctggcgatgtgaagtacaatgtcactctgctggaggacttggagctggtgctcgtagtcgtggactgcagcttcaccaatctcaagactggagacaacgcgatggtgcgattcttcaacttggtgcgctcccgttccgaccccgagaatttgtacatggtcaccatgtcgctcaacgtgcaggattacgagattcgggaccgcaacaagaaaggaccgtgtattctgaccatgattgcgattgcccaggacatgagtgagggcaacattggccagttctacctcatggcactgacatatccgtatcagagaacaatggagtttcaagtatatgaattcgcggggataactgaagacagctatctcgacttacgcagcgtgccgcaagacccgctcactcagccagtgaagcatgtggtgacgtcgagaaagcgggggttctttgacggggaggagcagtcgaacaaccgctacatgtacacacttctcgactcaaactcgacaagcgcacagagccgatgggagtggctcggagaagccgtaatctcggattcgtgggcctgggtacacggactgcacttcttctttggaatgcaaaccatcttttcgttgggcgtgttgtgtcttgtggcataccagaacgctcgcgcaggcaaactgtggatcggtgatccgtttgcgtccgtttcgactgctgggctcgtttcacgcggggttctagtcgtgatatcgtggtacttgaactcgttctggatgcttttcgagtactgtttgtcaattggtggacaaatctcgaaaacgcagattgttcgggttcacacggagctggtgcacgccgacgttctggtcgtgtacctgagcctagttgggctgctgagctccgtttttcgagagcgaatcgatccctccgtggtcatcttcctgtttgaaatcatctattccaagcatttagcccttctggcctcagcttcgacggtaattcgcaaggaggttgtgacttactccgacagtgttttccgcttaggagttccgaaagtgtcgaccgctgttgcgaagatggccccgctacgcttgtggaccgccttccagattcctcacgaaaaggatagtacgttcctcttcgcgtccttcttccccaacgccatcttactgtcgattatcgcgggttttgcgattctacacaagctctatcggcgctactttccggagaagaatcgacagcgttcgagcgtgatgagcacagagcgctcatcaatcaatgataggaccgcgcttgcaacgaaaggcaacctcaccaactttgagatttcaacaggcgccgagctgcagactcggttcggcatcatctccgactacaacaactacgtgtatttcaagggcatgaagtttgcgtcggctgatggtgtgtactgttctgggtacgtgatagtaaatgggaaaatgctggtgagcgtcaaacatcttctgtcagtcgtgatgatcaagaccactcgatcgcggctaacgaacgtctacgtgtacgaagtggagggcaacacggtaaaggatacagcacgactggtgtatccggaaacattcacgtggtcggatctgtggcgcctgaatgttacggtactgctgtgaattacagcacgattacataaatcctcgggtgtggtgcagtagttctaggcaacctggctagtgagataattcattttcgacttgcatactgcgcgtatcacgagcttcgaggatcttgtgaagcctagcgattggccccaaaattaccatgaaacttcctacgcgtcagactgggaagcttttagcaaggtcagagcatcgctgccgcagttatacgttcacccaccaaagcagcctgatagatacacgcagtcgatttataataaaaatgtcgccctcttcagcgcgtacttagtaaccttagcaattgaagttggttatgtatcaacaaagcatttttgcaggggtgttgctttcttgttctccgccgtctcatgacgagactgcattttcctgttagaatttccgctctacgacctttgcaatccttctacatgtatctctgccgtagaagtatgtagtggaattggaatccgaatgctgaagtactccaagcgagcgaagtgttttcggtactcgacttcgcgactttccaacagtactacgtaaaaaaaactccaggcagagtactattaccatttgtgttccgctatgagtccaaacagccacaagcagccaaagtcgcttctattcaaagcattttgcttgatcgcatccgcactcagcaagaatagcaacgtacatccgcttctatctcgtcgaggtggggcccattttcgaaccttcctgccacgactgaagcggaggagtgccgtctcaagcatggcgtcaggcgaaaacgatgccaacttctggaaaatgtcgctatcgaaagtcgaggtgaaccaccaagaagttggaccgtcaagacgctccgtccgctcgtccatactaagccgtgacagatcttacatcattcgcgagagtcacaaccgaatgctcccgtcgtggaaaggcctcactggcgggcaatcgaggtcaaagcggaagttcactaagtggcagattttcaacgtcgtgcggcgccttgtggtgatcgccgccgcgtgccagtatatctacatttccatgctggccacttggtgcacaatggaggtgctacgttcgatgcccaatccgactcaagtatttggagttttcactgcatcgctcatcgctgactacgcaggtgacggtctcattcgcgacagcccgttggtggataacgtgttggatggggatacaacgccccgagactacgtcatttatctcgagtccaagagccaagtctcgaccgaaaactgttcgcaggtaccgctattcaacgccaacatttacaaccacggcttcctcacgcacatgtacacgcaaatgatgaatgatacgagctacaacacaagtgttcttacggatctagagcttgtcgtagtggtcgtagactgcagctcaacacagctgaacaacggagatccgtcaattgtccgggtttacaatgtagcgcggtcacgtgacgacccaaccgatgtgtacttggtcatggtgtcgctttcgattcaagactaccagatgtggtcgtacaagaagtctggcccagctctcgtaggtatgattgctgtgatacacgacatacagggggatatcaccaagcagctctacatgatggcgcccacgtatccgtatcaacgctcgctggacttcgagatctacgagttcatcaggataacagaggaaagctgtcgagagttgcggagtatcccaaaagatccaacgacacaacctgtgaagcatttggtcacatcgaggaagcgtgggttctacgacggcgatgtccagtccaatattcactccatgtactcgcacctggatgtgacgaatgctaggagcgcgctgtatgagtgggagtggctgggagaggccatcatcgaggactcgtgggcgtgggtgcacggccttcacttcatcttcggcatgcagactttcttctcgctacttgtattattcctcgtgacataccagaacattcgcagtggtaagatttggattggggctccgtttgcctcgacatcgactgcaacatttgtgacacgaggcatactggtggtcatatcgtggtatgtgaactcgttctggacgcttttcgagttcgccatgtccaatgctgccatactctcaggcagtgaagggatgtacgtccacaaggagcttgtacacgccgatgttctcgtcgtatacctcggtttggtggcgttcctgagctggatgattcgcgagcgaatcgacccctcagtcgccatctttctgttcgagatcatccacaagcaccggctcagctttatccgcatctcaccttccgtgctgcacgagatcgtgacgaactcaaatagcgtatttcgcctcggagttgctgctaagacacccgtcgtagctgcgatggccccgctggacttctggtccgccttccagatccctaaaaaggacgctacgtttctcgctgcttcattcttccccaagatcagtctcttggcaatcgtcatttgctatgccctcttacgaaaggtttaccggcatttctacccggaagagatccaccaaagatcgacccgaagcacgaaccggtcgacgaacgagaacgctgcgattgcgcagaaagggaatttaaccaacttcgagatctcaacaggcgcagagctgcagacgcgcttcgggatcatctcggattacaagaactacgtgtatttcaaagggatgaagttcgcgtcagccgacggggtctattgctcggggtatgtcatcgtgaatgggaggtacttggtaagttcgaagcacctgatggcggtcgtcatgatgaagttggtgggagcgcgcttcaccaacgtctacgcgtatgaagtggaaggaaacacggtgaaggacactgccaggctggtgtttcccgatacttttacgtggttcgagttgtggcatttgaatgtcaacgtgctgctttagcgatactaaagtaaaagtaatgattagagcttcgcggatcaaggggctgaccccgggtaagaccacctaaattgcagcggtgttgtattttcagactgtgctctttccttgacagcttcatactcctgggtgatcttttcaattagccagtgccaatccaatccgaggtgcgttgccactcatgtcaaagacagcgtagtacttgccgaggaacgccgtcccgagaacccatgatggaattcctccgacgaacgccagcatacacttctcacccactcgcaacatgtattcctccttcgagatcgagaaggcatgcccgttcaacacaaacgtaatctctggcggactggactcgcagtcaatggagtacattcccacccccggcgcttcctctttcgcgcccaacgtctttgctacgctcgagatcgcttccgatggtccaaaaatgtaggcgcccatagtgaaaaatgtggctgcggagtccacggacattgtagtctctcctacctgaacttcatcaagcctcaccgcccacacattaggcgatacagtgttgatatacaccaactcgcccttgaatcgactcgcatcatacgatccaagcaggagctcgcccaagttgccgctccttccgatgtagagcgaaaacatcttgctctccaacagacctaggcacagtagatgatgcagtggcgtctcgacgcctgcctggctcgcagcgtcaaagcccagtccgaagatcccgtcgtacggtgcatacgggtatccaggccccaggcgactcgtgtcactcgcttcgccgaagaattggcttggcatttccacgtcgccgattccaagcacgtcacccgacagaattccagtaacgtagggcgagttgaagtaggatccgttggcttgatacgtcgacgacgcactgtggttgtaaaggtggtgagcccctggtgtctgtgcagggacccacacgtcgctggtcatgacgtcgaaagccacgttaaaagtctgtggaggtgtccccagcgagatcgcgccgtagtgaatatacccccgggagtgaagaacgacgcggtgatggcccgaatctgtcggtatctggggattggagagcgttgcagcgaccggaaggcccttgaacgaagatgaccacacctgggaatgcttcgagtgggttgccacccccaattcccacgggtgggcgaaggccaccacttgaaccatgaacagcgaggtggcgactatggtcgccgtcagcaccaaagcaagacgcctagatgatctctccctcatgtgaaccagcggcgcagactcaaggtggtagacgtcaaagtgagaggaacctcctgggtgcttcaaagtacaaaaagaggtacttttgaccaccatccactccatcgaattacagtcattccattggagttgttgtagagccgctcgggtgggagaagaattgggcgtactacctcccaatgtccgtccaatcatactaacaacacccaagcaagctctctcgctgcatcgcgtcacgatatggccgtcaatttggccgatcaccaccagatccgttcttgggatcgccatccagtgcagcttgtattgtgccatatagtgcgcaccgtcgtcctccaccatcttcatgagcccaaacgctttcaacgtgtccgccttgtagcagagcctaccgtcctcccacacgtacccactgagcaagatcatcttacagcgagcccccagcgttgtatctacacaacacggagccagtaacaatgccaacgacccatgtacccaccgtaccgatataacagcccccagagatcgagttgcagtgatcacaaagacaattccgaggacgatgatcccatgacccaccagactccagacgtagtacgagacggcctctgctaccggcttcgattctttgagactggaccgattcaaactcgttaggtacgcatgcattgcagccgagcaaatgcactccccgagcaacgaagtctcatagttaaacaataggcgcttgatgaaacatcgcggggtttcccccatccaattcgtggcctccaccatctcgaacagaattgacagcacgccggataaattatacccgagagaaatatactgcaacttcgcgagaagtccgtcctgtgcgatcaatagaaacaaatcgctcatcagaccttccacaagcaggtacaatagagcggcacggtgataatttctcgctccgtgagccgacagtcgcatactctcttgaacgtaaactacagcgtccttgaaggccatagactcgtggaggttcttacatcgccgcccgtatcgctggcaggaaacgaagcttcgtcggagcacgtttgaccgatagaaaatccagattgaaccgaaaaatccgtaccaatatgaccgacgatatgaggaatcccctacatctgtggccagactctccccattgctatcatacgtgccaagccctcgtacatgcacatacccgatattgtcacttgcacagaatgtgcccccagcttcctcgtaaaacgcgtagtacccgatactcccatggtagaaatagtagtcgaggtaatagctgttctcggcgcaactagctggcgtggtggatgaaggtggccccggcttcgaccctaagacatacgcgccgtggatattgtattggggcacgacgaagtggcaaacccgaccgtgtttcacatggtaatagtacgtgaccccgacgttccaccacgtctgcgcgatctccaaccctgtcatggggcaaagcgtctccatattcgcagtgtgttttattgcagaggctggaactacgagatcgtcggagattttgtgcggggtcacgaagcgcaggtagctgtcggcttggaggagcaacggcattaacccgatgcacgtccagacaatcatcagcacctttgtagcagtgaaccagctctcatcgccctccgcttgctcacggatgacgcgtggcagacttttccgatcatccacgcagtagaccaccgctgagccccgtcgtgacccagacgcgaatcgactgacgctcgtggccgacttgaccctcgcgacaaacgttggccgcctgctggtcctcattcttctgcgtccaggtgtggtttatcctcgaagctagcatgcgggtggtatttactatgcaagctgcgttcggtaacggatacaaaagctataaacgcaaacgcatgggacggagaccaaatttatgtacgttgtcaaacgtgttcggagctacatgcagtacgtagatggcgatctatcaattgtattgggattctacagggtggccatatatttcagtggacttatgatcaactcagctaaccttaccattcataggtatcgcacatcgttcgagctggcgagggaataaagccgaattcgaccacttcgaggttgcgaacgatcatgctgatcgaagcgaagccgttgaattgactgcagccctgtgagaccagatactgtggcaaactctgtttacagcgttgacttgctcggtttggatcgttgtgtggctgtttttagcgtttggcttcagctttcatttcttatgatagatcttgtcggtgttttgtcattgtctattcccaaaagtgaccaagctctgacccgcgcttggcgacatttgtgacgtcgacagcaaagaaccgagagtttttagcgatggtggaagtgtcgacgcctcaattccggcagatgggggccaagagcaaaaagtacgtcgtgcagaccaagcagaagcgcaccatcacaaagtggcaagttttaaccctggtacgacggctggcagtgattgccgctgcaattctgtacattcacgtctccatgatggcaacttggcacatgatggaagtgctgcgggatatgaccaaccccacccaatcgttcgcagtgttcacgtcttcactaatcgctggctacgttggtgacggcctcattcgagacagctcactgatgcaggaagtgttaggtggagataccacacctcgtgactacatgctgttccttgaatccgagacgaagacttcaaccgagggctgctccgacgtcccgctcttcacttcagaattgtacaactaccagttcctgggccatggtttctctgaaattgtgaacgacacgagctacaacatcacaattctcaaagacctggagcttgtggtggtggtggtagactgcacctttacgccactgacgaaaggtgatcggtcggttgtccggggttatgacctaatgcgctcccgtcaggacgccagtgaattgtatttactcatggcctccatgtctgtgccagactatgaggtacgtgcgcaccataagtttggccccggcctgctggggatgctcacggtggtccacgacatgcgtgataccgatttggagcagttttacctggtgtctccgacgtacccgtaccagcgttccttagacttcgagccctacgagttcgtcagggtaacaggagggtatctggagctgcgtagtgtaccccaagatctactcacacaaccagttaaatacgtgcacacaacgagaaaacgaggattctacaatggtgacgttcagtccaacatcaacttcatgtacacgctactggatatcgaggacgccaagaccgtcatgaccaagtgggagtggtttggtgaggctacgaccaccgactcgtgggcgtgggtgcatggactccacctctacttcgggttacagacgatttcttcgctcgttgtgctgagtatcatcagttaccacaacttccgcgcgggtaaaatctggatcggtgaccccttcgcctccgtctcaaccacgacgtttgtggtgcgaggtgttctggtgttggtttcctggtacacggacgccttttggtcgatatttgaactagcgatggctaatggagccgcgatgtcagagaacgagatcgtttacctccataaggagctggtgtacgcagacgttctggtcgggtatctcggcttggttgggattctcagttccgcaattcgagaacggatcgacccggggattacaattttcctgtttgaggttgtccaactgtttcgactccaaatactgcacgcgttttcttcagtggtggatacacttgtgtcttgctcggagaacgtttttcttctcggtaatatatcggtgccagacgcagtttacaacatgtcccccatggacttctggtccgccttccagaccccagcgatggatttcgtatttatttccgcctcctttttcccacgaactattttactggtctcagttctgggctacgcaattttgagggagatctattggcgctactaccccgatgaggcccatccgttatcaggtcaaagtgcgaatagatcggcgaacgagaaggccgcactggctcaaaagggtcacttgaccaacttcgagatctcgacgggcgctgagctccaaacccgctttggtatcatctcggactatagcaactacgtcttcttcaaaggcatgaagttcgcctccgcagatggggtttattgctcggggtacgtgatcgtcaacggccgaatcttggtggggtcgaagggaattgcttgcaatttcgatgatgaagtcttttggcgtccgtttcgcggctgtgtatgcattcgaggtggaaagaaacactatcaaagataccgctcgactcgtgtatcccgagacattcacatggtcggatctgtggcacttgaatgccgcggttctgctatgaaagttttgtcacctgaacctgcgaatagagagaaactacttaagtaaatgcaacagtttttgctgctcgaggaagatacgcattttctccactgcgcccgatcgtggctgtttttagcctactcgaggttgtagtactatcgtctattttcccgccacactgactgcctagccaactcactctttggataacctcagacctgaatagaagtcacaaagcacgccatgccagaggtaccgctctcgtcactcgatgccccgccactgcatgccaagagcaaaacgcgctcgctgtgtacagccttgttcgggcgcgacaagaagtacgtcgttcagaccaaaaccaagcgcaccatcaccaaatggcaagttttcaacatcgtccgtcggctcctggtcatcgtcgctgcaattctgtacatctacacctccatagtggcgtcatggcggataatggaagttttgcgggatatgaccacccccacccagtctttcggaagttttactgcatcccttatcggcggctacgtgggggatggttcaatccgagacagcccactggtgcaaggcgttttaggtggggacactacgccgcgagatcacatgctgtttctcgagtccgagacggaaacctccgtcgagaattgctccaatgtgccgcttttcactcccgacctgtacaactacgaattcctgacccaggcatactcggaaattgtgagcgataccagctacaacatcaccatactggatcaattagagcttgtcgtggtggtggtggattgcagctttactcctctcaccgagggcgatcgctcatcagcgcgcgtcttcaacttggttcgatctcggaatgacccttatgatttatacgtggttgtggtttcactgtctgtgcaagactacgaagtacacgcgcacagcgagtttgggccagcgctcttaggcatgctctctgtagttcacgacctgcgggaaaataatccagagcagtactacatggtagctgaaacctatccgtaccaacgctcgctggaattcggtctctacgaatttgtaggattgagcggtggatatctaaagttgcgcagtattccagaagacccactcacagagccggttgaagaggccctcctaacgaggaaacgtggcttctacaatggtgacatccagtccaacatgaacttcatgtacacgttacttgacgcgaaagatgcgaaaactgcgttgactacgtgggagtggttcggcaaggctcgcatctttgactcgtgggggtgggtacatggccttcacttcctttacgcactgcagatgatgctctccctcatcgtactttcaattgtaggctaccacaacttccgttctggtaaggtttggatcggtgacccattcgcgtcagtctccactgcaacattcgtcggacgaggaattttggtgttgatttcgtggtatgtggactcgttctggtcgattttcgagttagctatgtcggacggcgcagtcctatccgggaacgaccaggtctacatccacaaggagctcgtgtacgcagacattttggtcgtgtatctgggtttggttgcactgattagttcagccatccgagagcgaatcgaccccgggattgcgattttcctgtttgagattgtccagaacaaccgattccatattttccacgcgtcttcagaagttttcaacgcgctcgtgtcatattccgatagcctcgttcttcttggcaacgaggtggtgccggatgtggttgatgccatttcccccatggactactggtcggccttccagatcccaacgattgagttcaagttcatcgctgctgcatttttccctagaactattttactcttctcaattatcggctacgcgttattgaggaaaatctactggcgcttctaccccgaggagatccatccgctatcgggtcaaaccgtgaatcggtccacgaacgaggaagcggcgctggctcaaaaaggccacttgaccaattttgagatctcgaccggtgcagaactgcagacgcggtttggtattatctcggactacaacaactacgtctactttaaaggaatgaagtttgcatcggcagacggcatctactgctcggggtacgtaatcatgaacgggaagtttttggtaagctcgaaggatttactggcgattgcaatgatgaaagtggtcaacacgcgattcacggtcgtatacgcgtacgaagttgacggcaacacggtgaaggatacagcgcggctggtgtaccccgagactttcacttggacggatttgtggcatttaaacgtgtccgtgttgctctagaggaggtaaccatttggcgtgcactggaggattgaacttagtttatcgaactcgtaaacgcaacacaaggtcagtcatgaaaattttactcatattttgcagagaaaagctagattagttgttgtcaggaacacttcacatttccagcagagaattcttactggcaatagccctagcgactgcagattcgtcagccgagaccagttcattcttttcttgctcacgcagtcaccaaaagtcttccaagtcttccaacgccaaatcatggccccatccaccccgttcacgcctctctgcggccgccttgtccagtaggtggacgattccaaaatgccctccctcaagcgctttctcgtaggcctcttctagaccgagcgagttcgtgtcgagtaggtatttgaccacttgttcgtggccattggcggctgctgcagccagcgctgcgtgggggtagtagacatctcgaatggggtccagggcgaagcgccgcaagaaccgaacgacttcgaggtggccgttagcagcggctatctcgagcaagcgctccaactcggagcggtttggacgcatgaacctcagcacgaattcgacaatggaggcgtggccgtacttcgcggctgccgtgagctcgggcagcagccgctgcagccttgggtagtagatgtggagccacatgagcaccccatcatggccgttagacgccgcgtcgaggaatgcaaccgaggtgcagccctcgcgtctctcggcgcgcagcctcttgaggatgtcgaggcgtcctctcgccgcagctccgttcatggcgccgacggtgtaggggcggaacccctcgaacgctctgagcacgcacggcaggtcgttgtacacggcggcgtcgatggtcgacggcaggacgaactcgttcacgagctggccgacctgcgagatggcctggagacgcgggggcagcgcgtgctgcaccagcagcaagaccggaggctccatgggctgtcgatcttcgaacttcaactggctggcagtgtctgattggctctcacttgtatttgtcgcttatgttgcgattcatttttattttgcataacgttgttgcagcaacattgcaacttcaacgtgaagagatcgatacacgccacactactagttttacgggatccaggtggcccgtacaggtagtgtatccagagcctccattcccttcatgctgcatcactttcactgtcttggtcttggtccgctttacacagaatttcatcttgcgcgatggagcgcagcagctgaagaatgcctcgtccggtgaactggatgcgatcgcgccactcgggcgtgtgggtgccatcatacggcgccaacagctcttgaacgttgacatgggcttctgccacactctcctgtaactcctccacggtcggctctattggggcctctgagcttatcgaattgttgtcatcggtgtcgcctgaagctggcgtgtgaggggctgatcgtagcgatggccgcttagtgagggctacggtagcctcgtgcatcgctgcttcctcagcaaacgctgcggccttggctgttaatgaggtcaactgactcgcaaagcatgataggagtcggatcggacccccatgtgaaggatctttggatgcaagctcggtcgatccttcaaaccgatcgcgcagagcgattatcaccgcccgtacttcgtcgattcgctttgcgtcgcggtggaaggaatcgatgtcctcgtccgtccaggcgtaaatatcaccgattcgaatcgtgtgatccagtgccagccgacgcggagccaaaaggagcggctgtggcaagctgtcacctgctgcttccttttctttcgttggtttagcaacacctttggccatcaccactcggcttggtcttcggaagcctttagaaggaggaaggtgcgtcctcgtccgtgttctttgaaactccttgtgctccaccgattcagcatcagtcgcaccttggacatcatcatcgtcatcgtaatcttcctcgacgctgttggtttcggcgaacttctccatcgattccacgacatgaccttctcttttcctcgtctcttctcgaagctcaagcgagtcccaccacgcagctgaacgctgtcttctctccatccatcgggccagcatcatcttgtagaccaaatctaccgccgccgctaaactgcgtttgattttcctctcgagattcccaatttcttcgatccgcatggacttgaaaccgggggtacccaaccttgacgccttccacgcgaaggccacactgcatagatggaatccaatcccagccaagacatctcgtttccgtggtattcgtctgtcttctcgacctcctattggaaactgagccagaaaatcgccgtaatcctctcgccgatcaaagccaaaaggcgcaccatgcttattgactcggtgtcttcgccactcatcaacgtacaccagcagttccggtgtccactcgtacgtctccttggtcaaattgtcctccgaatacgccgaatcgccacataaccgtaaccgagaccgcaactccgcgtcatcacgcagcattccactcgtcgccttctcactgacaaccccagcgtgaacattcgatacgtcgcaccccatcgccagcgcatacaaatgcaagatcaaaaagtggaagtgcctggctgctctcctcgcgaacgccagcgtaaacctgagtttgttccacccgtggtggatccgaataaacgagtcgctcttgttcttcagcgcgaaggacctcctcttcagctcccggaagaacgggtccatactctgcgcaatgagcgtcaggttgtccgacgctgagatctcccacttgccgtccaaatgttgcggcggcggccggtacagaacctgcaggtagaagaacgggttcgtgtccttcagcgtcttcatgacgtcgtgtagcgccgtcttcgtgggcttcagctcctgatcctccttaactgcgcccgatacatcctcgtacaacctccacaacaccatcggcacccactggaacttcatcggcagctcttgttgctccttgatcgcctgccggcgctcggatatcagacacgttgcctttgtcatgagacgaggcagtctcttgacgacgctttcggtgcgcttagccaccggcttcttgttgccgtccactttgtgcagcaacttatcggtgcggtgcaggaggctcataacctgctgcgtctccattccgtcatccatttcggcggcagagagcgcctggaagcacgtaagttgctccagcgcaacatgcagtcggctgagctcgtccgcgcgggacttttgggcctggtactgcagatgctggcgctgcagcgagcgctggacggacgcgaaggcgtcgcccacgtcggcgcaaagctgcagcctccgcgcaacctgccgctggctggacgcctcatcgacgcgcttactgcgcgcagcagaggtgttagtgggtatgagaaagaggaggctattggcgaggggctcctaccgcttcgtcgagcgcttgggtgcctgctgctgcgatgcgagacctgtcattgctgtcagtgcaaaatgctcagcattgtggacgtaccgctaaagtggtacatggacacatccaggggaaaatccatggattatcgtaaaccccgaattgtaccagtaagtacagcagtaccctgatttgagtaacccattttttaccaatataatgttttccatcgtaattagtcataaaacgttttcgcggagccaatcaaaaagccagttgaagtgcaagcgatcctgctgctggtgcagcacgcgctgccgccagaggcggagccagccttaaaaaaatggggggcatagatttttttaaagtaaaatccacaacctacatttcgattcttctttttgtcatcgctttaaacttttcgaggaccgagtctttgtcgatgctgtttgtaagatcacgctcgatagccaaaaccatcaggtttgacatccaaagatctcccattgttgttctgagccgcgtcttaattcttttcatggctgagaaagacctctccgtagtagcagttgttacaggcagcacacacaccaagttaataattcggtgcaaggtcgggaacagctcgttgttattggtcccgacgagttggatgcatagttgttgcgttgtcttcaatttttggaacctttggcgatctttgccaaattgcgaaaccgagtggcctcttctcgaaggtcgtccagctcatcggtgaaatcatcaggataaaatgttttggccagctcaacaattttagtagcactccaattcttgaaattatcacgtgggctgagcgatccgcacaattccatgagactaagaacttctccactaaatcgtgaatccatttcagaaatcaggtcacgaaggatacagttgtatacttcatcacgatagtgagcttcttgtgtaggctggacaccatccctggaggagtccgctcctggaattccagccctgccacacccccgacttctcattccacgtcgtttccacacgtcatttttgtcaggaatgagaggggtgtcgtcaacttgtattgatttgcaaaagttgaccgatgagttccaaatcgattcaaaacttggcgagttcccagtcatagaactatcatcgagcatttcttttagttctttggatacctgtttcgtcatattcacagctgacacaatatcgacgtcatctttctgtaaaaattgggacagccgaattgtttttcccaaaacttgagtgagaatctccatatgaaatacgaagtcgaaagtccacatcatctctaaaaattcctgacgcctcagggcgtttgtgggggttcacaccatcgaccactacacgctctaacacacttgtaattggggcctaaagcatcttgacttttcttaacgcgcgaatgtggcaattccaccttgttttgctaagaccctcggtagaagttggttgatttaaacctctaccagattctagatgtccttgatcaagcatttttttccaattccacagcggcttcgtcaagaagttgatctttccttttagacgaagcacttacagtagtgtgaatcccttacacggtttcgaagcactgcactaccaagaccgtgttcatagtcactgcaactaggacgagattaagtcgatgcgcgaaacagtgaacatagtaggcgtaaggacactgggagcgtagacgtcgctgaagaccagtaatctcacccgacatgttggacgcaccatcatatccctggcctctacagctcgccaaaagcaatccccacttctctaactgcgttatcaaaccatcgtacagtgtctccgcattcgtatcgcgaacatggtcagttccaaaaaatctttctctaatagtccccgtagcagcgcacacaaaacgaattacgatagccatgtgctctttcttcgccacgcagcttgcttcatccaccagaacagaaagatatccatctgcaatctcgacctccataatatgctttcgaacaacatcagccgcacatttgatcagttcacgttgaatttgtggcgatgtgtacacagcgttttccccagctaacgacattgcgcgagaaaacgatggcgcgtgctgtgccatgaactgaacaatctcaataaaattgcctttattttgtgacgtatcctgtgcattgtaaaaaaacgttagtccagtgatgtcatttcttacataaaaattaaaccgctcgtataccttttcgtcgctgccccgaaatgcaatttcctgttttgctaggagaaggcagatctccagaataaaagtcaggcgctcacggttgtcgttcaccaatcttttaagaattcagagccacaccaacgtcattctgacaggatctccgattgtcgaaaccgatcagagcgagtggtgtttcgagctcgtttttgtcccaacatgttttgcaaatccgtcttttgtagtggcctttttccagttcctatagcccgttgtaggttgtgctacactgtgagctcgctttgctgcgtcattacttctcggctgaggtagcagcattagcaatacaccgcgtccgtcgaaggagagtattcgagccatgattttttttcaaaccactgggcccgaaaagcacgcatgcatccaccgatgtcacgggccggatattgcttgagttgcggttggtaaggaccgaggcgaacgtaggattgtataacgtcacgcagtagctgaggatcggcaatcagttgcttaacgaaaaataaatttggtggtctgtgagcaggatcccgcctaacaaagtctccagcggaacattcttcggctctatcaggaattttgttgagcgaacaccattccaacgctgcttgctcttgtttttcgcgcagcgttacaggttggggtcgtggcccaggatctgattcaatactgcgggccttgtcaaagtcttcgggctcttgacggggcttcttcacaaagaaggtcgtgattgccggctgtttcctctttccttcctgacggggcacacagcacttcttaacagaggaagcaggagtatacaaactccaagtgaacagccgttcacgtgtcactggtctgaaggggacgacttgacttgaaaagcggtagatctaagactgaatgtatttataggttggtacagatttggtctacatacaaaccctaagttccctatagtttgtgtcatacaaaatgtatctgttggctctgaggccacttgggtcactatccaggggagtgaccgatgtagccatcccggaatagtgacagggtcactattccatgtaaccccgttacatcctcccccacttagattcgatcttatcgaccaatcagagcgaggttacgccggcgattcacatttcactctcaaagtcgaaatccatcgacaacggcgcgagctctggcacctcggctcccgggcctcacagagcaactggcgcatcgccgagcaagccgcagggtctccagtcgaccggaagcatgcctccaaagcgcagtgcgcgcagtgcgaaagcacctccgaaaccgcgggccgtagggccgaagaccagggcggccaaggccaaggacgagtcgtccgcgctgatggaggccacgaaggcggccgaggaggtggtgcgctctcgtagcagcacgccggagagtggccgtcaggccggggctcggagcaagtctcctgacgccgcgcaaggcaaggaggagagtcctcggggccataaaagcccggctcgcgactgggaagccgccgtttttgactgcacgatggtccagtactccggtgagagcccgacgacgagaacgtctcggagggcagcacgcacgctgccgaaggcacggagctggcggcaggcgacatgaccaacgcctcggccgacgcaaaggcctcgtcagagaaggaggcggaggacgccgagtccggctcaggcgacagcaagcagtcgcacgacgaagtcgccatggccgacgctggggtcgtggccgagaagtcgccgagcgacgcgagctccaagcccaaggaggtgctggcatccaagcatctgacgcgggcacaaggtcgtgagcgtgcccaagcgtcgaaagcggctgtcgctgcgaaggccgccgaggccaaggcgaagaagcgttcagcttccaggtcgcctcgcggctccagctccaagctgttcatcgactcggagtctgaggacgaggagagtgccgtccacgagcccaaggagctctccaacaacctcgacgagtagcagcagcaataccacgctgctagctcgggtgcgtatgccaggcagccgactgccacgactgccatcgagtcttcttcaggcggggatgccacgtacccgcagggctacttcccacccgagcctggcactggtgcgccagcgctgttggagaagctctcggctcctcgtggccttatcggcgggaacacctcgaggggttcctatgagcgtgctcttgttgacaaagagcctctctttcttggtgacgttgaagtcgcccggtgtgtgctactagcaccacacaagctcacactgaaggagttcaccacgcttcgcaagaagccggaggacaagggtggactccatcctgtgtggggtttccactgggtcaagccgaatgacaacatgacctggagcgaggtggaagacctcttctggcgctacgtccagcgcaaagggtattccgaccaagagttcaaagaactccgtgaggatcgcactctgtccgcaatcctggacgtgcgcgagctccgcatcgagttcgctcaactcgtgagcaagcgcaagctccactcgaaaatggacgagctgaagcaagaggcgagagccaaagctcgtgaagagcatgggcgtggtgcgactacgtctgctaccgtgccccgggtaccggccaagaagccaaggactacttacgaagctgccgctgcttctcgtcccatatcgcaacagccttcgggcagtctgtctggagctgctcaacgggctcccacgcgttacccgactcagggtaacccctccacttcacgagcagctagcgcttgccatggagccgcagctcccggacgactcgttccacgtggtagtggatctgcccattacgatcaaggagggccggcggtggcctcgcacggccatggctacgagcctgaggcgacgcagccgtatgctggggccccgagtcaggtggtggccctgcagcaagaggagattcgtcttctccgggaccgtgtgtacgtcctcgagatcgcgcttggcgtcggccttggtggcgaggctgccgctcgtgctggccagcctggtgccgtggagcggctccgtgaggatgttgcctcgctctatcaagaaattcgcagtctccatggccgtgtggatcgtcgagccgacctgtcgtcttacgactcgctgcgaaaccagctcgctcgccttcgggccgagcttcatggccacgcgccgtatccggagcagcagcagccccactcgtatcaggcccagtttggccagggctcgtacggggcccctgcgtatgctgctccgatgtacgccgcgccgtcttacgaccagcgcgcgaatcaggcgccttaccacgactcgacgccgcgcttcgaggagctgcgctcttctccaccgggccacccaccgcttcctgcggggcagccagagccagagggtcatggtacctcttaagacgacccacgtaaaacgtcgggtgagtcgtcatcaacttgggcaagtctatggtgtacgccgcgccatgccggctgaggaccaatgaagcggtgcttcagcttgttgctctcgaccgagctaacagtgtttagcggtaggtttctagtatctaggagaactaaatccccaaccttaaacacgttcatgtttcctcttccatttcggtcagagtactccttctgtttatcttgggcttgcgccatggtgtctcgcatcctgctgattatgttcagcctgtcttcggcaaacgaggacagttgcttccgcaaggtggctggactcacgtccgagacttgggaggaaaaggttttccgagcctctcccccacttaggaccgaagccccggtactgcctcgtaatgtaagcggcacctgagggtggcgcaacccgttcaggtaaaagggcgtaaagcccgtcgatgcttgtaccgcactgttgagtgcgaactcaaccatgggcaagtgacgaatggcagaggcattagaagtaagtatagaggctcgacgaacgaaaatgcctgaagccgtatgttcggtaacgtagcagcacttcaacacacgatagtaagatcgttgaacgcttcgtttcctctttagatcagcccaagagtggggcatctccgcgcagatactgcggagcgtgtcttcgagcacgcgattgacgcgctccgtctggccatccgtctgcgggtggtccgccgtcgacatcgacagtcgtgtgccgagaaggcgaaacagcgtctgccagaacgtagcggtgaaccgcgggtctcgatcagagacaatggtctcgagcagaccgtggtgtcggaagacactgtccatgaacaggcgagcgacctcgtcgccagtgacggtgtcacgaactggagcaaagtggaccatcttgctcagacggcacacgaaggcaacaacaccagtgttgccacggtcatcggccggaagtccgaagacaaagtcgagactcatcgacttccagcagtccgctgggaccggcaggctctgcaatggtgccgaggcgtgaccggcaggcttcacgcgctggcatatctcgcacgtacggacgtaggtggcgacccacttgtacatgtgacgccaccaaaacatctgcgagacagacgcgtatgtcttctcacggccgagatggccactggatggagcgtcgtgcgcctccatcaggatgtcgtacttgagatcctcgtcgttgggcacgacaatacggggaggatcctcgggctcgaccctatagtggagcaaaccgtcagcccactcataacggtgcagccttgcacgttgtcggggcgtgagccactcgaccttggccgagccagtggccaagaaccgcacaagaggttcgagactggcatcgtctcggtaccccggcctgatgcgatcatacagatccgtcgtgacccgactaatatgagcaagctcgtagtcgggtcggcgcgacagcgcgtcggcaagcacgttcaacttgcccggcttgtactcgacacggaagttgtattccgcgaagaatgacagccaacgcgccatccgctgtgagagatgcggcgtgttgacggcagtccgcaaggacgcgtgctttgtataaacgacaaagggcgtcgagcccaggaggtgcactcggaacttgacaagagcgtacttcatggcaagtagctccttgtcgtggactggatagttccgttcggctgccttgagctgcctggactggaactagatgacccgttcgcggccttcatcgtcggcctgcaatagcgcacagccaattgcgtagtcagacgcatcacagactacgctgacaggcttcgtctcgtccggcaatgccaggactggcgcgcgctgtaagctcgctttgatgtcgttaaaagcatcttgatggcgacgctcccagcgccagtcgacatccttcttcaggagatccgacaagggccgtgccagctcggcgtagcctgcactatacttgtgcaggtagttggcgaggcccaaccactgtcgtaggtccttctgcgaccgaggtggcggccaagccgcgatggttttcaccttctccgggtccgcccggaccccggcgctgctgacaaagcagcccaggaccttgatctcctcagctgtgaacacacacttgtcgatgttggcgtacagcttgttcgcccgcatgacttcgaacacacgtcgaaggtgctggagatgcacctccatggccgtctggcctgcctcggcacggctgtggacgaagatgtcgtcaaagtacgtctgtgtgaacgcacgcaaaggtcggaacagttgtgtgaccaagcgattgaacgttgccggggcgttagaaagcccctgaggcatgaccagccactcccagagcataccgctcggcgtgctcacagccgtgagtgggatgtcgctctcgcgcatcaggatctggtagtatccgtccaccaggtccagcgcgctatacagcgtgcagccggccatgttgttgcgcaacacgtccttgcgcgggatcggtgtttgcgcaggcactgtcgcgctgttgagcttgttataagcatgaaccagacgccactttccgttcggtttgcgaacacagaaggtaggcgtcgagtgcggggacttcgactcccgcaccatgcctgccctcgccttggcggcaaagaaggcatcaatgacttcacactgctcccggggaagaggccattgcctacttcgtgcccggcacgagatcgatctcgtgcctgattcccctgtccgaaggaagattggacggtggatccttggacaccacgtcctcaaactccttcaccaaggggtacaccaggtcccggggggccttaagaatctcagagcccatgcgcgacgcgcgctgtctctggaactcctccaggactgcctggtccacctcgccgtgtggaacttggttacccacaccaggagcgcttccagcgactcccgcatcagttatggtctgagtgacctcctgtggaactatgttacccacatcggaagcgcctgcagtgccttcctcatcagttacggtctgagtgacctcgcgtggaacttggttacccacgccaacgccagcggcgccttctccagcagcccttgttgcctgcggtacttcgttacccgcgtgtggacctacattacccacctggtaggtgctgtccggcacctccactctcaggccttgtccggcccagtcggagtcgtcgtcagtctcgacggaccccaagaactcattagacgctgctgcgccctggcggccctcgcgggcgccccggctgctgccagaggtgggaacatgactcaccaaagctctgtcagagcgtgggggacggctggccccgatagccttgccgcgccagtcgatccaaggctcgtgttactccagccacggcatgccaaggatcaagtcgtacttgtccatgtctaggaccaagaacggctccgtgctgtcaaagccctcgaacttgacagtgaggtccatgtggacccgaggtacttctaccaccgtaccgtcggccagtcgtaccgagaccagcccgttgcctttgctgcctcgtagtgcgtcggcgtacttgtcgcgattgcatgcgacagtctggcggcgcgcaaagttcttggacgccccagagtcgatcaagattctcaagggatgatcgtatcccggtacactcgcgtgcaccacaagcagcccaccgctggccttctccgcttcgagagtacagaggctctcaggggctaagtccccatggcgtgcgccacccgcacgcccctcatgaagacttagtgtttccccagtagggcgccccgcccctactggtgtatggcgttcccctggttcctggggcgcggcttctgccagcgacccctagagccaaagggcttcgaagagaacttcttcagtcctcccgcgggacaagcacgtttcatgtgcccaagcttgccacagccgtagcagcgaatgtcgctctgctcggccatgcccagatccatgggaaccggcccgttgatcgctccattgccggagctaccattaggcgcaccgccagcggcagggttgctctgccataccgtggcgggggtacgagcctgcttgtggctgtactcctcctggagggcgatctgaatcacctcctccatagtgtttgcttgcacacggaacagttgcgtgcgggcaggcccaacacgcagaccgtccatgaacacggtcaccttgatgtgttcaggcagggggttccccaccaaagaggcagtgagcactcgcatctcctggatgtactcatgcagctcgcgccttccttgtttgcaggcgaggaagcgcgaacgctggcggtactcgtagttcgccggaagaaacgcggcccgcagctgctcgcacagctgggaccatgatgcgaagcatccaggcgtcgtcgcttcgcgcgtatacgcccaactgtttgcgcgaccactaaggttggagagcgcaaaggcgacacggagtcgctcgtccgagacgagagccgcgtccatcgtgagctcaacctctcgaacccagaagtgaaggttttctccttccttcccttcgaaggggtgaaccttcagccgcaggggcttcggttgcaccggcttcggcgcggccgcagtggactgcagcccttgaacgtgggcgatgagccctcgctcgtaggtgtcgaacgcgttgatacgctcaacctgctcagccggcgtcgccgccgctaagctacgcagggcgtctgtcccaaagatgcctgccatcttacgaacggacccgtactgcgagtcgttcagatggggaaactccgtacgatccatcttggctcactcgatgagaccacagaggattcaggtagtccaatctacccgcgtaggcgtaggattgactacaagtgctaccaagtgtgacggggcacacaacacttcttaacagaggaagcaggagtatacaaactccaagtgaacagccgttcacgtgtccctggtctgaagggacgacttgacttgaaaagcggtagatctaagactgaatgtatttataggttggtacagatttggtctacatacaaatcctaagttccctatagtttgtgtcatacaaaatgtatctgttggctctgaggccacttgggtcactatccaagggagtgaccgatgtagccatcccggaatagtgacagggtcactattccatgtaaccccgttacaccttccatgttattatcaactaagcggaggaacagtgtgaacttcatgcatgtgccgtctaaataaaaaaaatctaaaaaaaatcgaaacgccttcgccgaaaaatggggggcatgcgccccccccattttggccctggctccgcccctggctgccgccgcccatccaagccatcgcacacgccgtccagctcgtcaacgagttcgtcctgccgtcgaccatcgacgccgccgtgttcaacgacctgctcaaagcgttcgaggacttccgcccttatacagtgggcgccatggacggagccgcggccagggggcgcctcgacatcgtccagcggctgcatgtcgagcggatcgaaggttgctcgtcggctgcgctcatcggcgcggcgtccaacggccacttggaggtgctggagtggctctaccgtccctgtcgggagcagcgacggggctggacgagctcacggaagccacgaagcacggccaccttgggattatccggtttctacgggcatccacgcacctgcgagagttcgatcgggagcggttgctggtgatggcggctgccaacgggcacgttgcaattgttcgtgtctttctacgcggagtcgttgacgcccatggagcggtcgctgcagctgcgggcaatggtcatgtagcagtcgtgaagttcctgctcgccaataccaagctccatttatagggggcttggaagaaggcgcttgagggcggacacattggcaccatcgagctactgaccaaggctgcaggtgacgtcgctattgagttggcatttacgaaaatggcggcggtcattagtgcgaacacgatgcggctgatgctgaagaggcttaaactcgtggacaaagtgcttgggcgggtgtggtgatcgcagcaaagaacaacgacaaggaactagtgcctgttctgctggaaaaatgcccttcaatggagacgcccgggcgaaatctcgtttgggggagctatcggttcaccaaccccatccaatccgctgtcgctacagctatgagtgaggctgccgatgctggtcagttagacatgctcagagtcctaaccaagacaagtgcttcgtatgtgcgcgacatactgagccacgcagtgaataacgaccaaagggacgtccagaagctgttgttggaactgtgtgaggcgaagtacttgcaggagcatcggatggcgtcgtacatgacgactatgctggaacaagccgcagcatacgacgatttggagactgtacagcaaatatttgccaagtgtggcagagctgacgttggtgacgcgttgtggatagctgtcgagaacaactccgtcaaggtagtcagtctgcttgtcaagaagagcgaaccttgcagcgttgtggctgctttagttgaagccgctacaagaggcaaggctgacatggtgcaagccctgctcgaccactctggccaccaagcgattgagagtgctctggagaggacagtagcatctggaaacgttgagctatcgacgatgctgctccgtcgatgcaatccgagcgcgcacaagcgcatctttcaaaatgccgcgtcgagtggttgcgctggcgttctgcaactgctgctggacgagatggaacctcactgtatccatcgcgccttgttctgtgctgcagcgcgggggcacgtcgaggctgtagctgagttgctggagaaaagtgagtcatcagcgattgcatgcgcgctcgagtgcgccgccactgaaggtcgactttctgtggtgaaggtgctgcgtagccactgcgatgcggctactatccgcaatgctatgtcgaaagcgcaacttattggcgacgacgagatcgtacacctgctcagcagcaagaaagtgcggttcgagtgagcgcgaatgtttggctgttgggaaaggcctcgaccgtgatcgtgagacgtagcatttgttttagtgttttacattgtcggtaacttagctgcatttacgaagcgtaaaagaaggtatttgtacacatttggtaaggtagcacatcctggatttacctgtttatctagagcagcaccgacaccttcaggtgccacaaatccgtccacgtgaaggtgtccggaaacactaaccgtgcagcatcctgtacgttattgccctcgatttcgtacgcgtacacattcctatagcgtgcgcgtaccagtttcatcatcacgatcgcttgtaagtcctttgacgccaccaagaatttgccgtttacgatgacataccccgagcagtacacgccgtccgccgacgcgaacttcatccccttgaagtaaacgtaattcttgtagtccgagatgatcccaaagcgcgtctgtaactctgcgcccgtcgagatctcaaagttagtcaagtgccctttctcggcaagcgcagccttctcgttcgtagatcgatccgcagtgtggcccgatttgagatcgactttttcagggtagaagtgccggtacaccttccgtagcatggcgtagtgtgaaattgtcaatagcaagaccaatctaggaaagaacgaagtagcaatgaaggtgccatcttttgccgggatctggaaggcggaccagaaatccatcggagacatcgcgtacacgacgtccggtacccattcgtcaccaagcaggaaaagcttgttggagtacgaaacaaccccatccagaactccagacgcagcccgtagcaggttaaatcgatagatgtggataatctcaaacaaaatatatcatactcccgggtcaattcgttctcgaatagctgtactgatcagtccgaccaagccggtagacaacgagaacatccgcgtataccaactccttgtggatgaaaatctcctcactattcgataggacagctgcgtttgccatactcaactcgaatatcgaccagaatgagtccacgtaccacgagactaacacgagaacggctcgtccaacgagtgttgcagttgatacagacgaaaatgggtcacctagccaaactttcccggcgcgaaagttttgataacttatgatgcctaggacgattagagagaaaattggctgcattccgaagaagaagtgaagcccgtgcacccaagcccacgcgtcggtggtagtcggctggccaaaccattcccagtctgtcagcgcgcttttcgcatccacagcattttgcaatgtgtacatgtagttgatattcgactgcacgtcgccatcaaagaagccgcgtttcctcgttgtgaggagatccttaactggttgggtgagcgggtctcggggtacgctgcgcaactccaagtaccctttagtttcccttacgaactcatagggctcgaactccagcgaacgttggtacgggtacgtcggagtcacgaggtaaacttgttcgggatttgcctctcccatgtcgtgaattaaggtgagcattcctaggagggccggaccgaatttattgtgtgcgcgtatctcgtagtcctgaacagatagcgacgccatgaccagatacaaatcgtcagggtcgttgatggaacgaaccaggctgaagacgcgcgctgccgaccgatcacccttcgttaatggcgtgaaactgcagtccaccaccaccacaacaagctcgagttcatcgaggatggtgacgttgtagctggtatcgttcacgatttccatgtacccgtggatcaggaaggcgtatttgtacaggtcgggtgtgaacagcggcacgttggagcaattattgacggaggtcttcgtctcagactcgaggaacaagacgtagtctcgcggcgttgtatccccacctaagacgtcttgcacaagggggctgtcccggacgaagccgtcaccaatgtagccgccgataagagacgacgtgaaggagccgaacggttgagtggggttggacatatcacgcagcacctccatcgtgcgccaagtcgccatcatggacacgtagatgtacaagaacgcagccacgatcaccacaagccgacgaatgatgttgaagagctgccacttggtgatcttccatctcggtttggactgcacgatgtactgcttccttcgacccaacgctgttgaacgtatcgaccggcgtcccgatacggtggtaccttgcggcttgacctgaagctttgttatcgatgacgtcgccaccggcatgctttctcgctagtttgccggtgtcgaattggttaccaggctgccgctcttgatgcgatcataaccaaagttatggtaatcgccaaattgtctgcatgccattcgccaggacgagttctattgttgccaaatgataaagctgaagccgggctataaacagccagagccatgcagaatgttcatgcgaaagataaatgggaaaggtatttttttctgctgctctgcagttcctgaggtccttgtcctttacttttgcggtgattaatattatcattacgctaacattttttacttttattgccagcgattattatattataataaaaatcttgatgaaacttctccctatgccgccagcgatcgaaatggctggatgaggtgcattgggtagcgatcgtcgccaagggggtcccaatcctgctcattcttcccgcatagtgcagtccgaggaaatttaggatcactaccacacactggtgaaccgcccagcgacagggcttcccagacggcggtatccactcactctggcaattctctcagttgcgtgaactccaaagtcaggtaggagatgtacaagtcgccattatgagcctccggtagctctcgcaagggattccgagagaacgacaacgagtagtaatatgttgggatcgcagtgagtaggaagtcaattggcatcgccgtgatcttattgttgatcagtgaaagctcgctcagttcagggaggtgcttgaacatggtgggaaattcgtttagttgcgagtgctcaatgtaaatgatgctgactccactccatggctcgatgacgtcttcggtaattgtcgtcaggttcgtgtgaacaaactccaggtctctcaactgtttagggagaggggactgcagaattccatcggggatcccggtcatattcacgaacacaaacataacgaagagcatattctcgtgtagttgggccgacagggcggcttcttctccccacctttcaagcgttgcgttccagatctcaatgcccatgagcgatggaaattcgcggatgatcggaggtacgacaagtgctgggcagtgcatgaacgtgatcctccgcagcatctcacgttctaaccagtaaaggctgtcgaggggaggggtctgcaccatcgcgcgatagcaattgtacttgacaatggcgcagctgaagtttgaagcgagccacgggtgcatttgctgcagacacatgctcttgatgacctcgatatcgccattcacaacaccgtactgcgcttcgagatgcagcacgagaaccactgctcctgtagtgacgaagatcgtcgggatgacaattcggtgcagtcgagtagaagtttgcattcttgtggtagcccgtgataatacatcaaatgttgcagtcgcgacgctcgatgatttactggatcgaattgtcgggtgttcgagcatggcgctgcctgtagctttgggggcgagcggaccggatcgacttggtgaatttagcatagtcgcaatgctctgcaggcacaggaaggcgctggcatggggaacggctgtgattagcgcgtttgtccacgacatgaagaagaaggcacggttctccagtacgaggttcagaaactccgtgtcaccgtagagcagcgacattgggaagctcaggttcttgtagtcgaactgcatggcgtagggtaagaagatggcgcttgggaggacgatggctgtcgcaacagagatcaacgagtcgataacgatcgctacaacccttaccgacattcgtgcagacccagatcggagcagtatttggtggatcaagaaagccgaccagcagtttgcaacaacgagcgccaccttggagtgatttatccatgggcgtgcaatgagcgtgctgtacagataggcgtttgggacctgagtggcaatctccacaagttttcgagccgcaaaaacccgagcataagcctcgttgctgctgctttcgtcttggtagcgccagtcatgctgggggtttatccacttgtacaccggccaatacctcagtttcctcgcaccaaacgcaacgaaatccacgaggctaccagtgagattcatcggtcggactgtcagctgtcgagcactaatagatgcgccgatatgactgaggagcagcaacccgtgagctgcccccagaactcccagtgcagcgcccacagtccgaaagtgtcggtcacgcactggggctaataaatttgcaaagtagttgaggtactcgttctccatgatccagtagagcttggcacaggataatagaaaagctgcacagagcgcgtggaggaaagtcatgaacgtccagagtgcgatgtattcgtgccgaggaatgcgatgagatgtgccggtagccacggtttgccgaatctcttgagcacgagtactcgatacctggacggggttcacgcgaggcattgatcaccttttcttacgtgaagcgaaagttgtaaaaatgcgcttagaataggataatactagcagcagtcctccttttcttgtccaagagctttggttattggcagcctgatcctgcacttttagcccaggaataatgcgtgtgcatttattctcgaccctagtaaagatcacgcaatacgcaatggagtttgtatgctgcctcagcagcagtggggcgttctgcagggtccaaagcggtgcacgcgttgcctaggtccaccatggcttgtggacacatttctgaaaaagcgactcgaagactccccgtggcaatcccctgcatcagccgaatagcaggcactgcggctttcacggatgaaaactgtccgccggccatgttcgcgctctcttggagatagggctgcgagtgcttgtccagttctgatagcacgataccaaaggaaaagacgtccgccttggcatcatacggcatccccatgataacttcaggcgccatccacagacacgtccccactccagccgtcatcgtttgatccacatactcccgagagacgccaaagtccgtgactttggcttgcaacgcgcgattcaggagaatattccgggatttcaggtcacgatggagcacaggcggtgacaaagagtgcaggtacgtgagagcctcgcaagcgttgatagcgatgctgagtttgtcggaattgaaaccgatcggacacttgtctttctcgtactgattcagcagcgagcgcaggtctccaccgtccatatactccaccaccatacatacatctgtcaaggattcccacgccactccgatgagattcacaatacacggatgctccatcgtcgcgatcatcttcgcctctgcaaggaactgattgatctccagaatgctcttccgagactctgggagtagcgtcttgacagcaacttgcacgcccttccacatgccaagatgtactaccccgtatgcacctcgactgataacttcttgtatcgtgatcgagcttcgcgggatccgagctgccgtaatgtcgtcgtctgtccacaaacctggctgctccagagtcgaacgactgctcacgttcgtcattgaatgctgagtactatcgggtgtgtacgtcgttgtggcttctcgtctccctcgtctagtacccaaacgggttagaagacttgtgaaaaaccctccagcgctgtcatccaggttacgttgagtctgtgtttgcgttgtggatggtaggcggagaccagcgcagactacacaaacccgcatcttcttccgtgtcagggagcagttgtggcagatgatctcgaagcacacgcggcagtggtgcttacgtcggaacaccgtgaagtctttgctgcaaatgaagcaattgaaccgttcctcatcatttacccacggcgagcgagttgttgccgtctgggaagaatccataggataataaacatttgtccgctgtgaggtggactcggatattgggatagcagtggaaacatcagctgctgtcggccatgaactttgtgtcgactcagtttcaggcttcctcgtgtttgtccctgcgacgcggtgcatcttgactggctccacagctctagctcgtatcttgcgacgatagcggaatcggcactgcagagttcgtacagcagtcaggaaacggaagtacttcctccgctgggaggtcatcagcaggaagctcagcactttttgagccgacgttaagtatagcgcttgtgctttttgtctctgtcgatggactttgtagcggaacgcgatctgcagtgtccgaactgcgtgccgaaaacgcaagtatcgcctccgtatcattagactgaggacagtgtaaaatactttcctgcacgcttgacgtcgccgatcaatgcgaacagtctccagtgacgttcccgttgaaagcctaggtacctctgctggtacaatccaaagtggttcacccgtaagcgtcccaacacctgcaaatacctgaaggtgtttgatagcatcagtcagatccatgcgcttagaaggctcaaaggcgcataaggccaacacaaaactccattcgacatcgctcgtgaactgttgcggtcgaggaataaactgccgatgccgaagatgatccatgacagcagcgtcggggagatagactccccatggcacgtcgtaggtcaaggcctccaccacacacatcccaaacgagtacacgtccgactcaaatgttgggatctggctgttgcagccaagacattccggagctctccaccggatagcgcctccagagcccgtaggcttcgaccctgacgagacaaaactaaacccaaagtccgtcagtttggcgactccttcgccactcaccaggatctggttgcacttgaggtctccatggacaatcccattctggtgcagatactccagtcccaaggccgcctcgagcagcttcttccacgtgagcgtccgtccgtccgccttcttcttgtccaggtaatccaccaaattgcctttcgcagcctcctcacagatgaaaaagcacggctggcagtcgtaacaagcaccgaagaagttcacaatgtgtgggtgacgagctctgtgccagatccgcgcctctcgcaggaacgccttcttctcccgcggcgaggacactgtcacgcacttgatgacgactttcgagcctcgccaaacccctcgatagacctgtccgaacgaacctgaagcgaagggtttggcttgacgctgaacttcgtggcgtggaacaaaccactctgggatctcgggaattggggcgccggacatccgtgctatgcgctttgaggctgcttctaggagttcctgagattgggcgctgtatctcgccttgtgacggagactttcgctgttcagcagcaatagagctccggtctgtgaggtcgtgtccggcaactctcgggacaaatcggacgagttggattcccatgaatttttgagtcggttctccacttccagaacggcgtcgtcccagcgttctctccagtttgtaaggatcgagatggactgcgccggcgctaagggggttatcacttcgtcaatctcgttgtggaagccgcgtagcagccccaggatcgttcgagtgctggccagcctgacaacggacgtctgcttcgtgtgctgaaccaggaactcgtggaagcgggtcgtgatgccctgaagacccgccctcgtctgagtagaagtagcacttccactctcgtcaagtagcatctgcgctctccgcagtctctcgagcatgtcttcacacacatcctgcgtctcctccatccctccacacaactcgagcagcactggcagcagactcgtgacactcagctcctcctctccttctccttctccttcttcttcatcctgacctacccgacagaccgtctcatcgaccaccgcttccccttccggctcacgactcgcgacccagtaggacgacacccagtcccccacaactcgccacgcctcccgacctcttggctggtagccttgtatcgcctctgctgcctcccgctgtccgtctcgacaggccaagccccaggccgtcaccccgctcttgttcctcgcctccacgtcggctcctctctccagcaacagactcaccagacccaaatgtttcgacagcaccgccacgtgcagtggcgagtctccgtcttcgtctgcacagttgacgtccgctcctctgtccagcagcagccgagcagcttcttcgtggccgccgaacaccgcgcgactcaacgccgtctccccccaccggttggggcagttgatgtcggctcctgatgccagcagcagctcgaggagatccgagcgaccgtccgcggccgccgacgtcagcgccgtccacccatcgtcgtcccttgtgtcgacgtcttgagctcctaccaacgcagcgcgaacgtcttccaggcggccgcccttgacgacccccacgaggcggcccattgcgattcaagaggttcagcggcaggagccagcactggttggtgcatgtaactcgtcgggagatgctactgtagaatgggtacacgtataatataatactgcttgacgctcactcgatttccagcatcgaggtggtgctcgtgaggcggtgtacatgtacactgcctacactacgaagggatgtctggaccaaccagcgtatcgcaagctgcaactcccagctggtctcagctcggaagccagagaatcaccaaagccgttatgcaatcatccagctttgcgttatggcattctctcctcgcttacagtactgtacactcatagcccaacgcttcaatggcaactgaggcacattcagtgctaattttttgttttcatcgctaactaaagtagactaatcgtggtttatccaccgccctcaatacccaacaccatgacgtcgaccgtcaatgtcatggagccaacttgaaaactcacagtcgcagacctccgtgagcaatactgatacggaaccatcccatccttaggcgcgttcttaagttcccgggagctgggaccgggacgaacgggacgatacccctcgcacgtcaaacttgctaattgtaagcatttttttaagcccctaactctcggtaactaccgcgaactacggtgaaagaagaacatggtcagatagccctttcgaaacgtaacaaagtggtgcacacttggcgcgcattagtgaagaaatgaagtagctagggcgaaagtcccgcgggaccgggacaaaatgagctcggaaataaacctagcccgctttctgaaagccaatcaaatcgctctatttcgtcccgggagatgggaccgggaacttaagaacggctcttagtcggacataacctctacgcttgagatacttcatgctgtttctccaatcccatgagtgaccagctcagaagggagtcccttgaccactcaccagcttcatcagcttacgttctccaaagcatcagttcgcaatttactcagcgcagctcaagctcaagacaagaagatcgaaaatgcgccttgccgacttggcgctgctagtcgccacccttttcatcgcgagctgcaatgccttatcgtcaagtgagcagcagcagcgtattgtccctcctggtgcggacatccctcgctctcttgccgctgctagcgaagatatcaccgtcaagagctctctgaggtatggtgacgcgctggcagcggacgagaacgacgaagagagggggttgtcgtcgctgaaagcgaagattggtgctctctttaacaagctaaagtacaagtactgggtcaaacgaggcaagtcggaggccgagatctacaacatctgggtaaagcaaggcaagacggacaagcagatctacaaccttctggctcagcaaggaaactcggaccggaacatctacgacgtattcctgaggcaacgcctatccgacgcgcagatctacttcatgttccgaagattcggcaagtccgacgacgagatctacaaaatctggaaggagcagcgtcgatacatgtcggacatcaaccgcatttggctccgggttgggaagacggacgaagatatctacaagcttttgaagccgaaaatgtcgatgaataaactctacaacctttggcttcagctgcagaagagtgatgaaaagatctacaacatctggctcaaggagaatgtgcctacggagaaaatttacgccgcttggttcagctcgacaaggacgccggatagtgttcttgatcttctgcagaacgtgtacaaagatcagtctagagcgcacatgaccacgtatgtccagtacagatcctacttcaacgagaactatggcatcagggagtggtagatgacaacgcatcaattcacgttccaatgtagatggataattcttttctttcaagagagcaatatttctacgttctgcattgtggtacttcgaagtatttcttttttacgcccgacacttattttatagtaaataaaagtacgtgcaggttttttcacaggctatcgtttccattatttgttgttccgtgcttttgatcgtgtcaacacggagtttcgagcggttagaaattagggccgcatcgaagtcggaacgtcttacaagtgcgactctttttcagtagcatcaccccagttagttgaatgcaggcttgctacagcatatccgtttgctctcacaaagccgccttgcaattgtgcaccgcagcacagttcaagagtgtactgtagtggttggtttcgactcgaaactttcgagcgaccaacgtggatcctaatttccaatccaagccacaagccatgttgagtctttcccagcttacgccgataaccctacttttcccatgctgagctgtcgccctctctcccaaacgatcttgggtcagtatacggcatgcaagatctgaggagcccaagcgtctcattcccatctgcagtaaaggaactgaacgagcagggaagtttgtccagaacccgcaagtttggctctctcagttctcaagttaccaggagcccgacaagaccagcccacccaatcaagatgaacttcatctcctctatcgttgctctccttgcagccgtggttgtcgtttccacaccggtcgatgcggcggattgtccgaattgcggcgacacttggaaagcctctcagatcggggattgctgcaccggggtggccgccatggacttcaatagctgctgcatagcgagctgcgcacgcaacatgccctgcgcgtacccctgagatctggaaacgtagccgctttgcagcctagactcaaagtttgagtcgctgcgttaaatgtggaataaatcgagagctttttgaacttgctggtaggtgcttaaagccgaccgactaatgccttatataacctcgtaatactacttatgtacatgtagtgtgtagatgtgttgatccgtgttgccaacattcgccaagaagccgcaactcctttgatccctctcgatccataggttgtcaattttcttggtggtcctacattgtgtaaatttcgaggtcttttacctggatcggtcaccagctgactatcatcactgatgatactgatgattcatcagtcctcgtcttgatcaaactttgacaagctggcacaccaatcacctacactatcgaagtagtacagttgtagtattaatgtaatactaattcgaattagtatccacgaagccaacagggacaatgtaagagaaactgcaaaaatatggagatcgaagaggagccaacgacctcggcaagctttattcctgagtccaacgagctgctatcatcgcagctgagaaccgtacatgtttctgatgttgcggaaaatctcgactgtttgtcgagcaagctgcatagactgcgtctgcaccttttcacgcatccgagctgaccgaggtctgtgaccacaaagctcctgcatgtcttgcttcgtgacggccagcaactggattagatccttcaactcaggttggtccacggaaataccagtcccaaagcttatttcctcctgcacacccgtagcgttggagaccgcagcattctgcgtatttcgcttagttgggaccgacggcggttcctgagctgggtcaattgatgcatctgcagtggtctgagaggcgggggacctttcagcactggaagagcgtgcatgcgcgtttgtctcgcttgtctcgcccgcctcgacgtcttcttctgagcatggaaggtactttctctcatccggaagctggctggacgctgagtgtaacgcaagcttctccgtaccaacgagtgcgtccctgatcaacatctgagcgcgactcacggctgcgaggagctgtcttgttgcggagtcgaccactcctcggtcggcatcgctatcgttatcgcgaacaacgaagctgtatgtctggacctcgtgcttcagcatgtggtttgtgacagacgaaagcgcattcacatcgctgcgaattgcgtatacgtcgctccatcgcaataaataagataccagcgtttgctgatcccacgcacaaatagtttccgcgctcaatagctgagacggattcagatcgactccagtgagtgcgtcttcgctaggattgtgaatagaaagcgcggtaaccttacggttccaatattcctcggcgagacgttgctccacgatttcatccgctaccaaccgatcgacagagcttgggtcgcgatttgaacgattaccagagttcttcgatggggttggagcacgtgattgagccccggcgcttgggttcagacttccttgactccggtcactatagtacgcattgaactgtgtgaagtgaacacttcggagctgatcaggctcatccaataagcgtacagcccagagcgcctgcaggtggtgagcataaagctccagaatctttagaatgctggcagtcacgtccgtctcgaaagacagtacgcgctccagggcaacagcttcaaggttgtcagtccacttgaaatcgttccacagacacacaatgttcagcaattcgtcacagatacaccggagcaaaccgttgctgtcgtgctcgaaatcaaacgccagactctcgactccacgaaaaaagccgagtgggaacaacgccccttccgaaacagctccagaatggttctcgcctagcacactcttgctgttgtgtcgcttcgcctgaccctcgcgatagttgtacccccagatgtcaacgcagagcaaaagctcgggaaagaactcgtacgtgtctcgcagaagttcttcagctggctcattggcgctgctgagctgttgttgttgtggaggctgctgttgttgctgatacttgtgcggtaccacaagtttcaatctggacttgtagactcccatcttccgctcaaaatgagagttgttcagcgctatcggaagcgagtcaacctctttgcaggtcgtctggcccttcacgcaataaagatgcgacaccagtgagtgtagctgcatcgcaacaagatggagtttacggataatcgagttcatcttcttgcggttgagaacctccttgccaccgctgctacgagccagcgagtacgccacgttgtcgaatgacttcatgcgcgagctaatttgcgataccaatttccgctcccacttcagcgctgacgcgcctcgacagccgaactcacacgggtgggcgggtgacgtgcgcaaaggcgaggactcatccgcatcactggacatgatcgtcggatgcagataataatacgggtcgcccttagcaatttcatccatgagacgcttgtgcgtcaccctcatcacgtatgactgcgggtctgacgtgattacacgtgccaagagcgaccacacgaaaggcggtagctcgcgaggccagcgcggcgaagctccctcttccagtttcacggccagaaaatcacctccaagtttcagattggacttcttaggaaaaaattgtgccacaatgtgctcctgctcgtcagagtcatccgctgggtcatttggtgcagactcatcgaaccaaccatcattgtcccaatccatatcacctgcttcgtctgcattgacctggttttcagcggggattcgtgggggtgtgcagatcttcgtagtcgccttcttcgatgctgcagttgtcactggctcggcgataacatccttcttcctgcgaagccgcggcttcccgattccgagaacatgttccacgtccttctgtaacgcctcgacttgttgttgaaccgtctgttcgctcgctgccagcattttttcaaggcaactatccagtctattgagcagatcttgcttttgagactgatccacgtcacaacatcgtgaagcgacctgacactggatgtcataaataattccacatagcgcctccagccttcgacgacacttcatgtcgctttccaggcgacgatatttttcttcctgagctgtcagcgatgtcttgacggtgacgaaagccgcctcctcctgattcagtctctccagcgaagcgataacatggttgttaatccgcataccgtccgtgacgacgctttcaactgagcaagcagttgttcttgcaggcgcagcaagccgcgcttcgatggcatttgaagccgctattgggttcaaaaccttgctttcagcagtggtgctacattgagcgtcgttcgtagcattagaagccggtgcttggctcagaaaactgccctctgtagcactgcgtcgtgcgtcgacacccacactggttttaacacaaacactttttgcagaagacaaaggagggctagcaactcgacgctcctcttcatcaacagagaagcctgttgctttcctacacaaaatataaaaaataatggtgttaacgctggatcctgacgagtattgctagcacaatgcatatgtaccttggtggagaacttgcagagacattggattctggcgatgcgtaaccaaccggctcttgggccggggaacttgcacccaacggcactacttcgctctgcgaaagtcgttcgattggcccgcactgctgcggctcatcatttgcaccaattttgtcgttcgtacttgggccatttggactaccgttttcctgtccttgctctctcacggagctactcatctctacattgacagatcgtccacccagcacttcattatgctcctctgtccttgcggtctcacttgcccgagaatgaccatcgagtacgacgctgttagagcgcatctcacttgggctcccgacaacatcgaccggtactcgagctgtctccatgtggctgtcatcacggtcaggagaagtttcgccagctgtgctttctgcaacttcattaagttgatccatgaatgccgtcacacgaccaccggaaggtggagggataacatgttctgcgtggggcgcctcgaccatatcatcgtcattggcctcatactcaagagggggcgggatccgacggcgcttgtacatccgttgatgcccagctggactggtccactgctgcgaactaacactatcaaatcgtcgtcgccggcgcacaaccgggatctccacatggcgatattgtggggggtatccataggcaatagccatttcttcgtcgtcggtcatccattcgtcatcctcatcatcatacacatagtcataaatatacggcattcgttgccggtaaatagttggcggtggcgggccctcacttcgcatcgtgctaagcgggcgcttaagacttctgcgaggttgatgaacgggctggtgctgccttggaacgtctacaaactcagacgagtcgttcgcgccagcattctcgttcgtgagatccacagcttcgtcgtacgcagcgaaatcttcgccattctcctctccttcatcgccgtactcatacggactgtactctgcctgtgcaaagtggtttggcgctgctccctgataaatatgccgtggtcgagttcgcgaaatctgctgcccctgttccttcccatgcggcgacggcaccgcgtacatcggatatcctgcttcacgcatctgtgtcgggtaacttctcggcgcccaccgcgcgtggtccgggtaccgccgcactcgacggcgcgcaacgaagtgcgtcggtggctcattcctctgagcgtacgcagcttcagcacctgctgcatccaccgccgggcgtctcgtcggtaccacgaactcgctcttctcatcagcctccacatcggtcatgctcctatatctcggtcgctctcgtcgcaatctaggttcgtaatagactctctgcatgggccactgttcctcctccatctccatctcggtccatcgttcatccgttatagcctttctgcttgacgccgcagcgtccgccgagggggacatcatcccgcgtcgcgctcttcctgtgtccacctggtcgtaaacctgtctcgcatcgtccacctgtgcctgagtctcctttcgctcgcgctctctcgcagtagcgccggccctcgtgggcgtggacgcgcgcgccttcttctgcagatgcgtctgcactctgtccaccagtgtccgcagctgtcgcgtggcgtcctccagcgcctcgctcgaccccgccgacaccaggaagttcatcacgaacgcctgcgtctccggcgagcgctccgcctcgtcgggcgacagcgcgcagtagtcgatggcgcatcccgtggcgctcacaatcgcgccgatgccgctgcgcccgccgcgctccccgtacagatatggcaccagcagctcgggatgcacccgtgtggtcaggcgcacggtgcgaacgcgcggtgcgcgccgcgaagcctgtcgtgcctgcgtctgcgtctgtgacttctgttcgcccgtatagggcggctgcggcgacgcgtcgtccgcgctgggctccgtctgcatgttctcggcgccggaggccatgatccgctagccaagcgttggttcttctacttatttgggcggtccgattgctgcaggctgtttggaaggtttgcatggagatgacgtatggtggtcccatatttatcttgatttaagtattagagaagaaattggaatatggtgtgtgccacaccaagttgacctaccatcactctggcacaggtttttacgcagcgtaattacggcctcttgacgacatggctacactcccgcacttccaacgttcagtatccaagccaaagcttgcccttgacacgtatgagcgcggcgacgacgacgatggaggagctggcgcgtctacgcaacgcgctgggagcgagcgacaagcagacgcagcgcttcctgcaaccgctgttgcctctgcgcggcgtgcaggagctgctgctgacgttcgtgcgggacacgtcgcgctcgttcgaggactgggtctgggacccgcaggtgcgccaaaccctgctgcgcatgcgcgacgccgaaccgcagatgcacgcgcagggcgagagcctggaccagtggtacgcgcgcgcggtggaggagaagatgagcgccatggcactgcagaatcccgacgacgacacgccgcccgagttcctgcaggaggcagacgccgcacagagcgacggcaagcagaagttcaaggagaagaactattacgcagcgagaaacgccttccaaaagagtattgaggctgtgctcaagcatcagcagagcgagtactatggcaacaccgtccctccggccgagtgggacgatctggacatgcaggagcgatacgtcacgctgtgcaacaatgtagccatctgcggcatcaagatgaaagacttgtcattgataaatgagtatgcgggcaaggcgctggccgtggaccagtcttccagtaaggcgctgtacgcgatggccaagctgaggctgatggagcatagattcgtggaggcgcaagaggttctcgacacggcattgaagttccacccagacaagtcgcagtattttaacttgcgcaaagagatcgaggcggtggagaggaagcaagcgttggagcaggcagaactgtcggagatcagagcgaagcaggtgcaagcagcgattgcggctggagcaaagaatcctgccgcgccgcttgagatgacgacggaagagcgcgaagagcagtacaagcaggagatgcaacagagagtggatacgactccgctgccgacgagagaggatgataccttcgctgctgcgagactgaacgtctacttcatgaaaatcaagcagaggatgatggtggatatccaacctcgttacaacgccgataagggagaagaaccgcttttcgagtgcaccattgtgaacggtaccacgggcgaagtactcgctgctggagttcatggtgtctcgaagaaagttgtcaagaatgaggcgtgcaagattgcaatcgagaaactgtggcaggacaagcaagcggctggcaagctggtcccagaggacttgacatatctagagaggttcgagcgtgcgaaggcaagtggacagccgctaatgtccgagcctgcagccccagcgatgccacagaaggcacctaacagctcatctcagttgccgacacggcttagttggctggagcgacaacttcaacctttacctctgctaaaccagcttactcagcgcggaacactgcaagcacgcttcgacattgaagatgtgtcgcccaataaggaggtcaccgagttcaagtgcacgggcttcctgaacggcgagcaagttgctgttgccaacgtcatcagcaagaagaaagctcgtgttgaagttgccaagcaagtgctagctgccgcgtttgagaagaacctgctgatcgtttacgaccgacctgcgaacgacgaaatcgaagacggagccaagcgccaagaagagagcgagcagacgcccgcgcacggaggatgaagttaatttatttgcggtatgaagtgtggcctgccgtggcgtccagctgatcgttcacgtggatacgggctcctccgtcgccgataggtgcttgcttgcctgcctgcctgctttgtttcgttcctggtgtcgtgtcctcggtccgtccgcttcaatatgaatgctcgtctttcgctctatatcgctggtggttgagatggtggtctctcgtgtttaatcgtttgcttctcggtctccactgctaatctacagattcggtgcatctgggcgagcgctggtcacgcgtgcaccctaactagatgtgccctgttccatcgcttaatcggcgtggacgtcgagcgagagctgatacaccttctgcgcgcgtcgtgcgcggaggaagtacatgatgctggtgccgaagacacacaggtacaggaacgccgccaggaaaatgctcgtcgccagcgacgacttgggcttgccctcgggcggtcgcaccttgatgtatagcgagttgctgctcacgatgcagcccacaatgagctaaccaaaggaaccacgttagcttatcatcgcattgacacaccgtagaatcgcaaaagccaagcttaccagcaaaaagaagccggaaaacgagaagatggcgcagcaaataatacctggacagcagccacacataaatcacccgtcagtctcacctgtataatggcgtcaatcaaccatgagcccaaagcgacgcaccaggatgcgtctgcggcccttggctggatccttgggccagcagctcctccaggtcggcggtgtctccgaggtcgctgacgtcgctgccgggcgagcccacgttgaggtgcttgaggttggcgtagccggccttgccgccgctcacgacggacacgacgtccgtgcggtcaaacgtcgccgtcatttccttgcgcaggtctccgtagacatccttcaagcgcgacatggcgcacgcagacacagaacacagcgctcaagcggaggtcagcacgctgcgcgactcgggggctgactggcggcgcgttgcgttttggaatgtgaacacgtgcgccgcgccagagccaagcagcggaaacggaggctcttacaactgaccccgagcgagggggcggctgggtgacggctatttttccctccggtgctggctgcgtgcgtgggctgcgacggcgggcagcgaggggcgataggaatagaccgagggcgccacgagtgcaaacgaaaatggatgcgatgtgtgctctgccgacgtcacccggttgcttcgctggctacattcagtcgggcgcgttagctcttccaatccgccctcgacagcacattttggacgcttctcattggtctgtgaaccgccaattttgtgaaatcaaatactgtcaaaaacctcgatcgtattgtcaaaaaactcacaaatcgcacaaaaatcacgcgagcgatatctggggtccattgcattgtcacatacaaatttcaagtgtagcgccattccatacaaaaatcaaaaggttctttaaggccctcgaggtttttttgccaaggataatggcccaaccggtttccactcattgcgcagacagatccgggatccgataccggagagccgagcacctctcttcctcgcccgagaagccacgcccccaagaccatgagcacgcagagcaacgtgtttttggcgctgcagccggagaagcgcaagaaaaagacggccgagccgccgcagagcaagatgttcgcgtccttcgtgaacaacccgtccacgtcggcctggggcgacgacagcgacgacgagatgcacgtggccgaggcccccgccgtggagcaggccgctgaggaggaggaagaggaggaagaggacagcgacagcgagagcgaggaggaagaagaagaggaggaggaggaacagaccgacaagcccgccgctgctgctgctgcccccaagaaggcggccggcccggcccgcacgctgtccaagaaggagaagaaggagctcgagatgaaggagttcgaggccgcgctggccgacctcggcgtcaaggtggaggacgcccccaagcccaagaaggacgagaccaagaaggaggagaagaaggcggagacgcccgcggacgccggcgcctcggacaagaagaagaaaaagaagggcaagaagcccgccaaggccgccgagcccgagactgccaccacggaggtggtggacatcaaggccgtcatgaaggccaagggcaagaagaagaaagcggccgagcccgccgccgtgcggatcgctcgcgaggagaaggccaaggccaagggcaagggcaagaaggacaagagcaacttcaacgagttctccatctaggtaggcggagaacgcggcgctgtgctggctgcgtcggcgtcggtttagcccctggggcgaaggtggccggaggtgcgacggagtggagagacaggaaggcgctcgtcacagcagcctccgtcgcgtgctctcgagcagccaagaacggccggagccagcgaaagcccgatcagccagccacgcacgcgcgctgccctcccaggtgcttgcttgcgagcgacgcgcctctttttgcctgttgccaagagagatgtagagcgcagtcagcgatagacacctgcacaaaggatcagaaaatataaaacacaaaactcaatgcctctgctgcttgaagtgatgcatcatcgcaaggatatcgaaaccaggctggcagcgcgtttatatgcgcatgaagctctcgtccaagatgccatatctgtcttatctactgcaattcctttttgctgcaggttgaagctcactcgacgcgggcgaacgctaatctacatgtatttcctgtcattaaaatcatactgtgcgttgcctgcacgcggatactagccgttcggctccggtcgagccgagtcacaccacaccacgccaaacgatgcagcgccatccgcctgccttaccagcttgatatacatacctaatctgcttgtcggtcttgtgcctatcaacttgaacttcaggcgacctcaaccgtagccggatgcatgaggtagctgtactcgtccgtcggcagcggcatgagatgccacggcgtgcctgctgcgggagctcgtcgactgtaccatcttgccagcttagtgaagagtgacggcgcctcttcctgtgtgtgcacgagctgctgcagctgccagtgcttagtagcgacaacgcctaccacaactccagctagaagactagccacgaactgtaccggcccaaacaggcgtccgtccttgcggctccagagagaaaagtggactgtgggcagcgtcagctgctccacgtagcgcttgtggcgcgtcatggcggcgttcaagttggtcaccacgtccttggccacgtcttccaagcaagtagacgtcgaagaggacacggaggaggtcaccgacgcagcgtcctccgagccgctgagctcgggggcgtcgttgaacgagccgcttcgtcgtcgagggctgctcgtgagcagcgggtggttggcggccacggcggcgcgcagcatctcgtagtcggccagcgagtccacgcgcagcctggggacgtcgacctgggccagcacgagccgcagcacgctgtggacgcagacgcacagcgagatgggtcagccacaatgcaacaacgtcaagttatcagaaggaaggcgaagcgacgcactgttcggcctgatttgcgcggtcggtggcgcggcgcgcgcggttttgggccagcagcagcgcgtcgctgatgcggcgcatggagctcatgtccagctccgaggcggtgcggcggtgcgcgggctccggcatggcggcggcgaggtagaggggagcgagagaatgaagggggaagtgcgcgctccgcggctggttcaagtatgcggcgtttggcgctgcttggcgaagttttctcagagatattcgacgtgggatctgccctgcggtgcatctttttatatcgagggacgcaggatatcagcatacggaaatactgggagttggtatgtggcatacccaaaagaggatgttgagaccatccaccgaaatgcactcggtgccagcgtgaaagtgcacacataagcgaattgtactgataatatttggttaaggagggattaggtatcggagggaagtctggcctgccggctgttttatgctaaacaaacaaccgtttctctgctgccccgcatcgtgaaaagccgcagagcagcctgcaattggctgggtggccgacacgtcgatcctgagttcaaattcagaattggtacaaacctaaacgactgcacaagcgcacgatggctccggacgtcgctctcgctgccttcgacttcgcccacaagaaattttcgcactcgcatcgaatgcagatgggtctttgctagtgttgattaccaacgctggaagctcgaggctcgctttacatttcgctaggagtcggatgaagcaaatggtactgtactacatgcacatggctacacgctcgacgcgggtgaaacgcaaggggaccacggcaacgactgcaggctcacccgagcgggcagctttgcacgtcgagttcacttggagattttcttttttatgccattgattcattaccgctttccttcacactcaactctctcatggccaagcacggctcagcgtttcgtcgcctcggctgtcctgccctactgcagataccaacgctgctttcactctactgtctgccgcgaatcaccgaaatggcttcacctacttcaacatcgctcgcagcagcaggacggcagctacaaccgacgaccacgatgttgcccgcctacaatcgcggggccacgtcgtcggacggcggtgccggcacgaacgccttgcgtggcgggttcaacttggccggggccggggccgccacgggagcagcgcgctgcttctgttgggccagtgcggccaccttctcctgcacacggcggccgtagtgcggctcgcacttggtgaagttggcgatggcgcgcgcctgcacgggcttggacgcgttgaccagcgagccggcaatgttgtccgtaaggcgctcgcgcgcggcggcgtccagcgtcttgcggtagaagtcgcccacctgcgagaagttgtcgtcgtcgcgggtcgagtacttgtccaccagcgagtggtcggcgcggtacgcgtggtagcgaagcgtcgtgtcctcgggcgggccgttcttgctgttggggaagtagttgggcgcgtcgtgcatgttgccgttgacgaccatgaagccgtcgcgctggtacgtctgcggctccttgagcgggcggttcaccgggatctggttgtagttggctcccaggcggtggcgctgcgtatccgggtaggagaacagccggccctgcagcatcttgtcgggcgagggctcaatgcccggcaccatgtgcgacggcgagaaggcgatctgctcgatctcggcgaagtagttgctcgggttgcggttgagcacgaggcgacccacctcgatgagcgggtacttgccgtgcggccagaccttggtgacgtcgaaggggttgacgctctccttggccgcttgctcgggggtcatgacctggatgtacagcgtccacgacggatactgcttgttggcgacggcctcgtacaggtcgcggatggcgtagtccgggtcggagctcgcgagctcggcggccttgtccacggccaggttgcggatgccctggtccgtcttgaagtggtacttgacgtacgtggtctcgccctgggcgttgacgttggcgaacgtgtgactgccgtagccgttcatgaagcggaagccgtccgggatgccgcggtctgagaagaggaagctctgctggtgcagcgtctcggggcgcagcgagaagaagtcccacatcatgtcgtcgtccttgaggtgcgtgctgggcaggcgcttctgcgtgtgaatgaagctcgggaagaggatcgggtcacggatgaagaagatgggcgtgttgttgcccacaaggtcccagttgccctcctccgtgtagaacttgatggcgaagccgcgcgggtcgcgcgccgtgtcggcgctgccgagctcgccgccgacggtcgagaagcggatggccacgggcgtgcgcttgcccacgcggtcgaagagcttggcgctgcagaacttggtcacgtccgcgtgcgtcacctcgaagtagccgaaggcgccgccgcccttggcgtgcaccacgcgctcaggcacgcgctcgcggtcgaagtgggccatgtggtcgatgaaggcgaagtcctggagcaccatggggccgcgcgggccggcggtggccgacgccgtcagcccgttgggcgggatgggcgcgccggtgctcgtggtggcggtcgggctcttctggaccatggtggcgggcgggacagagacgaagacttgcgctctcgacggcaggttgaagaatggctttggtcgacgtgcgaggtgagactcaagcggccgtgtttttgtttgacgcaacactttggtcagtatcgaaaggtggacaaattccgggtgacgtggtgtttcactagcgtgcatgatgcaatcatgcaagctgacatataatttgtgtgcaactacgcaacacgattgtggtcggtaaagtcagggggttgttgatggatggaccctcggaatcgcaacctcccgagttgaatatgctgtatacgaggtcggcgatggctacatcgagcttcaacttgctggaccaatcctaggtcgctcgtcctctgggccacacactctagatggtgccacagtgaggatcaccgccttatattccatgcattccgttgattcaccgccaccggatggaggtcttcgtagtgttgactggggatggagcagcgcgtcgacgcttgtggggcgtagcggtggccagtgtgcaagatggacgcccagacgcagttgccaactttcacgctcgccgtctacgtcggagtgctcgccatcatcgtggtgctcgccgtggccttcaccatgcttcgcatctacgcgtaccgcaacaggctgtcgactgtcacgatcagtgccagctacgacgcggacgctgaactcgcagatgccaacagcaacgcgctcatcgcgacgacgctcagtgcgctggggagtccactgcccgatttccccgacgaaccgcctgtgaccagcaagacgtcgatgctctccagcttcggcagcagccgctgggaacaagtcaggagcttcgtcgccggtattcgcagcagggggaccacggcgtggtcttcacttcgccaacggttcgctagtcgaagagcgagcaagacatcgaaccggaagactgactatcgtggctcgcagcctgatgttgacatcgtcacgccgtgtgataatcacctcaagctcccggtgacgccgaacacgtgccagcactcgtccaagttccagctcagtctgtttcgctcgccggcgtcggacgatgttggcatgatctaaaggagatgaagtctgtgtcgaagagaattcaagagtttagagtaagcgttcaatattaatgagcctcttttgctagctttgaatgcttcaagcccaagctcctccgccgggttgactgatcgtcgacatccttgggctgctgcctgcggatgtttaagaaattatcaattacaagcagtatcgagcccgtaggattccaacggcacatagaacaataaagttagtctgcaggaactttccaatccaccgcgtcgagaccacatccatcagcaaaattcttgagctatcaaagctatatgaagtagtcgcttttttattgataataacctttagcaagcaatacgtcttcaaacacaacatgtgaactatagctgtcgccattcagataaaccaagtaccgagcgatacctcatctactgccagaagctgcgttcactccaatcgtgttttcttgctgctcagcagctggacgacatcttcgtagccaacaactcgcgctctcgtcacggcattgcggatagtagccgaatcacaatagtcgcgcagaaccttcaccaccgaaacccgaccttcaacaaccgcacattcaagagcgtacgcaatagccgacgactcacttttctccaccagcttagcgacaacctcagcatgtccccgcgccgcagcacaggtcaaggcgcgatggacactgagcggttccatctcatccagcagcagttgcagaaccccaacagaaccactcgatgcagcattttggaagatgcgctggtgcgcacttggatcacatctagcgagcagcattgtcgatatctcggtgttcctcgaggatattgtctttcgcagagccttctcgaccgcttggtgatcggaatggtcaagcaaggcttgcactatgtcagccttgccggcggttgcagcttcaatgagggccccgacgacgctagaaggttcgcttttctcaaccaacagactgatcacctccacagaaccgttctcgaccgccgtctccaacgcatcgccaatatcgacttcaccgcacttggcaaagataagcttcagattttgtacgttgccgtccgctgcggcttgctccagcatactcgtaataacagttgccatccgaggctctctcagatacttctcccatatttcgagcaacatatcctggacttcccactggttgttgttcactgcatgacacagggtttcgcccgcgtacgaagcgctattcttcgccagaagcttgagcatatctagtcgaccggcatctgctgcgtcaaccatggcacttgcgaccgcagattggatcggattggtgaaccgactgcttccccaaactcgatttcgtcccgttgcctccatcgaaggacacctttccagcagaagttggacaacgtcactcctgttgttttttgctgcgaccaccaaaatttctcccagcacgtattcgtcaacttggaacctctccagtaccagccgcatcgtatctgcactgatcaccgccgcggcgtttctgaaggccgcattaatgccgaagtcatctgcagccttggcgagtagctcgatggctccaatatgccctccctcaatagccttctccaaagcctcctgtacagatagcaggcgcatgtcaagtagtaacttcaccactgctacatgtccattggccgctgctgcagcgagagccccgtgggcatcaataatttggcctacgaagacccgaacgactgctatatgaccattgccagcagctatctccaacagcttttcccgatcggacattgacagcggcgtgaacatcagtatgtactggataatgtcatgatggccatgcttcgcagcttccgtcccgatcggacattgacagcggcgtcaacatcagtatgtactggataatgtcatgatggccatgcttcgcagcttccgtgagttcttgcatcccttgcctgagcttcgggtagcaatggtagagccactccagcacgtccatgtgaccgttagacgcggcgccaacaaatgccgcggagcatctttccccctggccgcagctccgtccattgcgccaacagtgtaggggcgggattcttgaaacacttcgagcacgcgctgcaggtcgttgtacacagcggcgtcgatggtcgacggcaggacaaactcgttcacgagctggacggcgtgtgggatggcttggatgtgcggcggcagcgcgtgctgcaccagcagcaggattggaggcgccatgaggtgcaacgttgtttgttgcccgtggtttcggctactcttcgaaaaaaaatggtcacgaaaaagagctaatgacaaattaccagaaattcttgacgtggtcctctcaaggatgtccatggcggagacgccatgaagaaaccccttgtgtgtcagtcagtcgccctggtggtgaatactttaagcataataaatgcacaccacgtttcgttgcgatttccacaatactgtgttgatgagaaactagcactcggataagcatgtgatgaacatgcttgcccacatcaaggtgcccgtatatcgcaaaaaacaatctctagcgcggcttcgtcgccctaacagctcacacggaagaccccttacaaaacatcacaacacaacctggagtaaagctgaagccaactcttttacacagtcagtttaaatgtaaaatgactgcacgagcacataaaaaacatgtttcactctaaagaaacacaaatttagacgaatgtgaagcactcactgcgttcactccgatcgtgttttcttgctgctcagcagctggacgacatcttcgtagtcgacaacttgcgctttcgtcacggcattgcggatactggcagaatcacaatagtcgcgcagaaccttcaccacagaaactcgaccttcaacagcagcacattcaagagcgcacgcaatagccgacgactcacttttctccaccaacatagcgacaacctcagtgtacccccgcgatgcagcacaggtcaaggcgcgatggacactgagcggttccatctcatccagcagcagttgcagaaccccaacagaaccactcgatgcagcattatgaaagatgcgctggtgcgcacttggatcacatctagcgagcagcattgtcgatatctcggtgtttcccgaggatattgtctttcgtagagccttctcgaccgcttggtgatcggaatggtcaagcaaggcttgcactatgtcagccttgccggcggttgcagcttcaatgagggccccgacgacgctagaaggttcgcttttctcaaccaacagactgatcacctccacagaaccgttctcgaccgccgtctccaacgcatcgccaatatcgacttcaccgcacttggcaaagataagcttcagattttgtacgttgccgtccgctgcggcttgctccagcatactcgtaataacagttgccatccgaggctctctcagatacttctcccatatttcgagcaacatatcctggacttcccactggttgttgttcactgcatgacacagggtttcgcccgcgtacgaagcgctattcttcgccagaagcttgagcatatctagtcgaccggcatctgctgcgtcaaccatggcacttgcgaccgcagattggatcggattggtgaaccgactgcttccccaaactcgatttcgtcccgttgcctccatcgaaggacacctttccagcagaagttggacaacgtcactcctgttgttttttgctgcgatcaccaagacttcccccagcacagagtcgtcaacttggtacctctccaaaatcaaccgcatcgtatctgcacttatcaccgccaccgtgcttctgagagccgtgccaatgccaaagtcgtctgcagccttcaccaggatctcgatggctccgatatacccaccctcaatagccttctccaacgcctcctgcacagacagcgggatcgtgtcaagcagcagctgcaccactgctacatgcccgtttacggcggctgcaacgagcgctccgtaggcatcaatggttccccgtagaaagactcgaacaactgtaatatcgccattggcagcggccagcaccaacaacttctcccgatcggattgctgcaggggcgtgaacctcagtacaaaatggataatgtcgagatgaccgtgcctcgtggcttccgtgagctcctgcatcccccgccgcatcttcggatagcgatagtagagccactccagcacctccagatggccgttggacgccgcaccgatgaacgcagtcagcgagcagccttcatcccgctcgacgtgcagccgctggaggatgtcgagacgtccgagggtcgcagctccgtccatggcgccaattgtctgagggcggaacatctcgaacgctttgagcacgcgctgcaggtcgttggacacggcagcgtcgatggtggacggcaggacgaactcgttgacgagctggacgacatgcgagaggccttggacttgcagcggcagcgcgtgctgcaccagcagcaggatcggaggctccatcgacgttcgattttttcgtttgcacggaggggctacactaggctacggaggtttacgttgcgcatattgcgtattaatatctttacagcaacattagcacttcaaccaactgtttcttgatctgaagctcatgaagatgtggcgggcccaaataagccggcaatccgtccatgtttcatcttgcaaacagtttcaggcgtaaaataaaataaataaatatggttataagccggactcgaaatacgtagcgggtatatttgccatcacttgtcgacagtgtcagcttgcgtcgattcagcggcaggacgcatgggtctccatcgggtcaaggtcgagccagccccgcctcacctgcatttgcgctcaaacaagggaaaattcggcggactcggtcgtatcagggtccagccagtcttgcgtcgccagcaatcgctctcgaaagtcgcaaggccgggtggactcgcgtgtacatgcgagtggttactcaagttctggcgtcgaagtcaaatcggacagcggagtcagtactcggttgagcggttcctttcgtttcgcgactactaccagcacacgtcgaccgcccgcgcagttgctgtttgtttattcacaccaatccccgccgtcttggtcgcgcttctgacggactgcatcccgctgaaagcgccttctgatggctggcggtctaattctgctttttggattcggttgtttatcgacgtgtttgcaatcgcggtgggactttctgctcaagtgaaagatgcaattgtggagggagctatctcgaatggtggtgctgttgtggtcgcatttggaactgccatctttttcatattgctagccatcgctattgtagcaacgtggcgctttccgattccttttggtggtatactagcaattatcccgctgattctgctcgaggggcttcttacggtcatgatcgttggacctcgtgtgataattcaaccatcggtacttcgccagcaggttaaggcgcagtttatgattgttggaactcaaggtttactggcaattacattcccgataatcagcacggtgttctatcggctcacagccgctcagcaaatagcgtttgtcttcgtcacaccaattctgaagcttttcaccaagcaagtcatcgctaatgtgacggagagcctgcatgaatacgtcggagtcattgtcgttttctctgtggatgtctttcatatctactacgtcgcgatctgcctgcaaacagcgaaattgacggtcacgatgctacttattatcgtgtcggatgccttccaactagcgatcgctctccatgccatttttcgtcggctcgacactatcaaaactaggaaagggagcaattctcggctgccaatcaactacctggaagacttgccagttctgatacacaacacgtttgagaatctccacatctcgctttcacaagttggtcgagttcgcatttttgcacctttaccgctgccactctcgaatgacagcacgactttcatgaacgaaataacgataagcaggcgaaacatgcacgtctactactcgtcttgcgacctgatgcctattcgattcaaccaccgatcaagaaaccccagtctcgatcaccgtgaacggaagcagtttttcactgcgttacgacgaaggactcgagagagagtgcgcatgacaaagatggtatctccagattccacgacacacaagttcagatttcgttttggaaatcgccttactcgaaaaccgtcgaaacgaaagggctctgtttctcgaagacttctaacattgctgcacccggacaccgtcatttcgaccaacacgctacgagctattctgtcgaaaagcgtcaccgaagaagtcgtgtgggaggcgctgcagactcttttccactccgagtaccttctgatgtccatgtacatcaggtgcatgctaccaatgctctattcagggtatctatcgttactgtttcttctaccagtgaaagcgtactacccacaaacggtagaattgaccccagagaggctgggcgaaattgtggggcacatcacggtttttggtgctgtcgagttcgttggattcgcggggcttatcctggtactacgacggaagttcggcatctcgcctctgttccaactcgcgtttgtgctggagacgcaagcacgcactgtacagggacacttgtttgtgtggaccatcttcattctgcatttaccattattccactacggtaagtacacaaggccagactgaggttgagaagaactttagctaacgtgtcgatctgatcttaggtgtggacttcaatgtgtctttttaagaccaagcactgcacgcaatatggctgtatgctcatggcaacttgttagagccctagcacagaaatggctccaccgtttcaactcggcaacgacgcatgttgtgctaattgcacctgcaattcgaccagatcctgctcccactcggccggccaacttggtaccaccaatggagtccttactcgcacctgctccacttgctgcgaactaactgcgtaagtttccagcccaagcgcggccatcacgacttcacttctatctccgaagagcacgtgggttagcgcttcaagaccaatatcatcgccccaagcacgacggcaaaacagcgaaaaagcttgtaccaagtcccggacatcttctctctttggtgctgacagcgcaaaaaataaagttacattcgtcaccaaagtcagcacatttccacgtcctacttcagcgcagttcagcccaacgcagctcgctcgctcacctattgcttccgtcgccagtcgaagtggaagcggctgtcgatcttgcatgatactatcttgctgaatctcagcataaagtggtgatagccccgctggcgtctgagctcgactaggagacctactgacaggctcttcgtgctcttcgtgctgattctgctggtcatgccactgagtcgcaatctttgccacgtcgggttggaccctcaccacggcttgagagccacaggccttgctcaaactctgctgcgtcactccgcacagagcgctgaccaccagtggaggagtcttcacactggcagctagcgcgtgtcggatctggatactcacgctcttgagctgcgacggcggcatgcacaacaccaacacgtcgctctctcgtgcgattcgagtgttgtcgtagtaccgaggtaccaactggaacatggggagagctgagggggctttcagcgcctcgcaacgcgggactcggtccggctgacgcgtcgacaacgcgatccggtcggctcggtatccgttggccaggatcgtcatgaccactgcagccccgacgctgccgcctcccaggacgccaattctaggcggctccttgcccgctgcagcgtaacacttggtgcacgcaagaaccagcaagaaaacctcgtgggctacgacttggatcgacagcgagcgcgtgtggtgcagcagctggactttcggagccaaccgcgtcggagccagcaactcgtctcggatcttgaagggctttttggtagcgctgctgttgcctccattccctgaagctgccgtagctggcggggactgcgatggaagcgtcgaagccgctaccgacgaaatgctgctggccatgccgatcaggcgtgaagggtcggactcttgggttattcgagcgtctcaacgttaggtttgggaacgcgtacactttgtaatggttgtgtagcaggaacgtgcgttattaggctcaaagactccaaaaacaaacaagtcgcttgactcatcaattgcgcccgatggttggagatgcatgtctgctagaagatcgactgcgatggctgtcaatcagctttcatgactcctatgccatcgttcaccggtatcaagagaggacaacgcgacaagaagaagggtatgcaagatgcgagctcgttttgagagtctcgagttgagacaaccggagggacgagcactatccctgcctctaataaacgccctggtttgctggataaacgcaagctgccctcgccatttggccttgacacgcaaggcgcccaagcttgcaaatcaaggctcgcctcgccgtatggacggcgaggcaacttgcttcaagcaagtgccgacagccccacacgctcgaagaggccaattcgtgcctcagcacttaattagtacctaccgagcatatttcagctctggagtaagtctaagctcacagtacatgtacccgcaaactgaagcaagcccgcctcagcttcaggggatggcatcgtcggtcaacgggtgaaacccgagccagatgctgatcatcgtgtccgcatttatgttgccatacgaacgccaagtcaaacacgtcactgaccatcactccttcagcgttagttgaagtagctggccggcccttcaggcccagtctcagttgtggattcgccggctagcgctcagacctcagcgcacccttcaattagccctcgcctccctcccctcgttccttgccccgcctaccatgtggacgctacgccgctcgctgcgccgctcccccgtgagtttgatgctgcccgcgcaccgccgcgcgctgaccgcggccgccgcctcgcagggcaaagtgcccatcgagaacctgtacgtgacgtccaccgaggtgaccaagaagacggcgcccgtgctcatcggtctcgcgcacgtgctggagcacaagttcgacaaggtggggtacttccgccccatccagcccagccccgactcgagcatggccgaccaccacgtggacgtcatgaagcagcagctggagctcccccacaacgtcgagcagctctacggcgtgaccagtcagcgcgccatggaggccatgctgaatggcaagggcgacgacatcgtggaggagatcctggagaggtacgaggagtgccgcaagggccacgacttcatgctcatcgagggctcgcagatctccaagcacgagagcgccatgagctggaagatcaacgtggacatcgccaaggccatcggctcgcccgtgctgatggtcacggactttggagactcggctgccaagaacggagagttgctggaggagatggtttcgcgcacggtcatgggcaaggaccaggccgatgcggcgggactcaactacctcggcacgatcgcgaaccgcgtgcgcgccaaggacgcggacaaattgcgtgcggaccttaaagaaaagctggacgagaaggacattccgttcctggggttcctgccgatggacgagattatcgcgtccaagcggctgaacgaggtgacgcatcagctcggagcgacccagctcttcggcaacacgatcgccaacgatgctgtggtgacctctgcagtcgtggcagctagtgcgctgaaggacctattcgcgcacttgaagaagtacaaggatggcgctatgatcatcacgtctggtgaccgatccgacctcatgctcggcctcatggtctctcgcttgcctggtgtgctgcccaacatctcggccatcgttctcacgaacggcaactacccgcacagcaacacgcaagaaattcttaagggcgtggaggcgctggacaagaccggactgtcgcttcctatcttctcaaccccgaatgacaccttctccactgctgatggcttcgcgaaagtctcgacggacattctgcccacgagtaaactgaaaattgaccgttccaagcaactctttgacgagtttgtcgagaaggagatgcttatcggtgagcttgaccagggtatggtggtgaaccgctcaccgaagcagttccagcacttcctgtttagcaagtcgcgtgcggtgcagcgccacattgtgctgtccgagggcgaagatatccgcgtgctgcaggctgccgatcagatcttgcgtcagaatctgtccaagatcactatcctgggcaaccccgatgagattttgctgaacgccaagactgccaacctcgatctctctcgcgctaacattgtgcgtccatcggacagcgagttgctggacaagtacgtcgactacttctacgagaagcgaaaacataagggcgtaacgaaagagctggcacgcgactactgcaaggacgaaacctactttggcacgctcatggtggagttgggcgacgccgatggcatggtctccggtgcctgccacaccaccgccaacaccatccgtcctgctctgcagctcatcaagacggcgcccaaccgccccatcgtgtccagcgtcttcttcatgtgcctcgaggacggcgtccgcatctacggcgactgcgccgtgaacacggacccgagcgcgcaggacctggcgcagatcgcggtgacgagcgccgagagcgcggaggcgttcggcctgatcccgaaggtggcgctgctgtcgtacgcgacgggcgactcgaactcgggtccgatcatcgacaaggttcgtgaggcgacgaagatcgcgcaggagctgcgtccggacctggacatctacggcccgatccagtacgacgccgcggtggacgcgtcgatcgcgaagacgaagctgaaggcgatcccgagcggcgcgaaggtgggcggccaggcgaacgtgctgatcttcccggacctgaacacgggcaacaacacgtacaaggcggtgcagcagagcacgggctgcatcgcgatgggtccgatgctgcagggtctgcgcaagccggtgaacgacctgagccgcggagcgacggtgaaggacatcgtgacgacggtggcgatcacggcgatccaggcggaccaggtgatcctcaagcgcgaggcggaggccaagaagtgaagggtgcaagtggatgtcaaggcccttgattcacatcgggccgccccaggggcggcccgatgtgaatcgaggcgtgctggccgccagccgaaccgtgccagcaactccaggaacaggtgaggtgagtgaaagcgacgcgtgcaccgtcgaatctcgttggtcggtcggtgatggataagccccgcataggcaacacgattaacttatcggacagagctcgttgtgcccttgccattggttgcccttcaacgctggccttcgtgtcgtttgtcgcaggcgtgacgtcggcgcgcagtgccgcacttttcaccggcttttggtgcttggtgaaccgtcgacaccgcgactatgtccccatactgaagcgaagtcaaagttcgagcgaattcggttccggtccttctcgttcgcacgctggatgggcagattccccgtccaaagcgatcgcccgttattattgggccgtggccatgcggcggcgtcgccgatccagccaaatgtcagttggccgtggtctgtctcgcggtccgcggtcttcccgagtccccagttgcggatttgccccaagaagcccagccgccgccccgagaccgccgacagcagcagcagcatgtggacgctgcgcaacacgatccgccgccgcgcggcgctgcggcagcgccgcgcgctcaccgccgccgccatcgcgcagggcaaggtgcccatcgacaagctcttcgtgacgtccaccgaggtgaccaagaagacggcgcccgtgctcatcggcctggccaacacgctggagcagaagttcgccaaggtgggctacttccgcccgatccagcccagcgccgagtcgagcatggccgaccaccacgtggaggtcatgcgcgagcagctggggctcaacaaggaggtgagccagctgtacggcgtgacgagcgagcgcgccatcgagagctggctcaacggccgcgaggacgacctcgtggaggagatcctggaccgcttcgagcagtgccgcgagggccacgacttcatgatcatcgagggctcgcagatctccaagcacgagagcgccatgagctggaagatcaacgtggacatcgccaaggccatcggctcgcccgtgctgaccatctcggacttcagcgagtcggccaacacgaacggcgagctgctcgaggagatcctgtcccgcacggcgcttaacaaagaccaggtggagggcgccggcctcaacttcatcggcaacattgccaaccgcgtcaacaccaaggaccccaaggcgctgcgcgaggccctgcgccccaaggtggaggagaaggacctgcccttcctcggcttcatgcccaaggacgacttcatcgcctccaagcgcctgaacgaggtgacccaccagctcggagccacgcagctcttcggcaccaaggccatcccgaacaacgtcgtggtcacgtcggctgtcgtggccaccagcgccctcaaggacctcttctcgcacctcaagaactacaaggacggcgcgctcgtgatcacgtcggcggaccgctcggacgtcatgctgggcctcatggcctcgcgcctgcccggcatcctgcccaacgtgtctgcgatcgtgctgactaacggcagctacccgcacagcaacacgcaggagattctgaagggtgttgaggctctggacaagactggcctgtcgatcccgatcttctcggtgcccgaggacacgttcacgaccgcggacaagttctccaaggtgtcgacggacatcctgcccacgagccagctcaagattgaccgctccaagcagcttttcgacgacttcgtgggcaaggagaaccttattggcgagctggacgagggcatggtcgtgaaccgctcgcccaagcagttccagcacttcctcttcagcaagtcgcgcgccgtgcagcgtcacatcgtgctgacggagggcgaggatatccgcgtgctgcaggccgcggaccaggtgctgcgccagaagctgtcgaaggtaacgattctgggcaacccggacgacatccagcgccacgccaagtcgctcaacctcgatctctcgcgcgccaacattgtgcgcacggccgagagcgacctgctcgagagctacgtggaccactactaccagaagcgcaagcacaagggcgtgactcgcgagacggcccgagacgccgtcctggaggagacgtgcttcggtaccatgatggttgagatgggcgacgccgatggcatggtctccggtgcctgccacaccaccgccaacaccatccgtcctgctctgcagctcatcaagacggcgcccaaccgccccatcgtgtccagcgtcttcttcatgtgcctcgaggacggcgtccgcatctacggcgactgcgccgtgaacacggacccgagcgcgcaggacctggcgcagatcgcggtgacgagcgccgagagcgcggaggcgttcggcctgatcccgaaggtggcgctgctgtcgtacgcgacgggcgactcgaactcgggtccgatcatcgacaaggttcgtgaggcgacgaagatcgcgcaggagctgcgtccggacctggacatctacggcccgatccagtacgacgccgcggtggacgcgtcgatcgcgaagacgaagctgaaggcgatcccgagcggcgcgaaggtgggcggccaggcgaacgtgctgatcttcccggacctgaacacgggcaacaacacgtacaaggcggtgcagcagagcacgggctgcatcgcgatgggtccgatgctgcagggtctgcgcaagccggtgaacgacctgagccgcggagcgacggtgaaggacatcgtgacgacggtggcgatcacggcgatccaggcggaccaggtgatcctcaagcgcgaggccgaggctgccacggccaagctgtaaatggcgccgatggattagacgcgatgtgggcattgcggacaatagaagcaataggcaggggccaagtcgcctggtatcaggtcagcgccagcaatgtgcataatggaataacttatctgctttgattcgtggtttgaaacgacgagttcgctgctcaggcccgggcttttgttgagcatattgcagtgctgtccagtaactctcttatacaccgggtcgattggtaccgagatcagcgcaaggaccggtatatcgtactatggggcgctaccaggcaacagtacaggctgtagtgtacttaattttcctctctcctgcatgaagaccatgtggggctagagctgtttcatttttcgattagtgaggctagcctctgcgaggtttgcaccgcacgccaacccccagggagtggtgtggtgggtgaaaatatcctgagcgcgacctactgtcggacgcgcctggtcttctcgctcgagactcttcgcatctcggagcgaaagactcaatgaagcagctcactacgcgacctccttgatggctaccacgcacccagacttagattgccgttgatcagatcactgggaagcttcgaggaggtcgttcacagcatgtccttggggccttggccgcccaaattatcggatcttgtcggacatgcgttcgctctcatggataggcttgacttgttcgtcatcatggccttctatcgtcgaacccgaaaactacgtttccgatctctgttgcacgccgatagaaactgcacatttttgacaacgctcttgtgtcttgcgagtcgcaagacataagaaaaaattcgcaatgcagcatatttagttccccttcggcttgaaaataggaaacagaaccccatagtacgaagtcggtttaaggcggtgtcgcagttcaagccgacgggctctcctcctgcgccttcaccgtgtggtggtttctgcttctaggcgtgcacgcagttgtggctttcttcaacgcactaacgttatacggatactactactggaacctgcaggatacctacctcaacgtccttctggtatcgtttcaaatcggtttgccgctcgagaatggccgtgcagtcgcaatcgtccacatcattatggcggtcctacacggattctgcattttgctgatgctcggcggatcgatctggaatcgttcgttggctttcactccatgggcttcgtgcactgccgaggtcaagaccgaagaagtaaaatcttcagatcgaacacgttcaagaatcactcggagcttcaccacagtttacgctaaagtctcggatcgtcatgggcttttaggtgttaatggcaggcacttccacacaattcagctatgccgggaactcgtcgaaactacgctacaaacccgccaagcatatcgtatgagcatgttgctacgtcgtgcactacttaaccgcatctacgtcgtcttgatcgtgatgaactgctgggcgccggccattgtgaacacgtggctctttaagggtgacgaggcttgtaagcggtacaccatcatcctgtcggattgcgctcttaacctcatatcgtacgtcggtgtggcgattatcgtcattgtggggtataccggggactacgatctgacactctggggattcgactatcttacctggtacaacgagcttcaaatggtcatcgtggtctcttggatggatctggcgactcgcagtatcttctcgttgagtctgatcgccacaactaccaacatgaaggagctgctccagcgtctaccgcataagaaaaatcgcattggccagtcggtcttcacggctccatcatccttcgacattgcaacaatcaaaactatcccgtcaactcgtgggcgatttttctgctatgactccaagctgctggctcaattcgaaaaactgactttgcactcgggtcacattctattcgggatttggggcgcagtggtgcttgcatttcatatccaagcttcgacgcagccattgctatcccaatgcctaattcatgtgagaccgtggggtgtttctcgtccgtcctgcttcttggcggggcttgattgctacactttgggcatatctggtctggcggatgaagtggacaaggattggagcgagttcgatagcttcgctgtggttcaagtgttgattcgacactgtccagctcttgaagtacccgctcgactcagcgagtttcacagtctcagagcgatcaaagtgtacaatacgactattgtagattgggggaaatcggctgctcttacatcaacgaaccacccaaacttgctgtcgttgttcctcattcgagtcaatatgacggacggtgttctccccgctgggtttcttacgcccgacttcccaccgtcagtgtacgatgtggagttttgcgttagcaatctgcgggagctgccggatgatttagatactaaatggctcacgacatccggttacaattcgagtacagccagctaactaccgtcgatcccgtttttctgcggctagaacctggcacgggcaacccgataactgagatcccgcccggtgtgttcgagattgataatacctaccttatcggaatcagcgacttggatattcaagagctgccacgcaatgtgaccaagttatctgtgggcttagcttgggccttcatgcgtggaaccaatgtgtcgttcttctgggactgggctgtgagctcgtggagcgcatggccccagcttctccgtggattgctggctactcgccttattgcgatgatctgcgaatttcgcagacgctgatggacccatctgcggagaacattcaggttatcgggcgggctgcaactgcaatgatcacactagtcttccctctggcggaggaatgttccactctttgttttacgaagacagcatcaacgccatcagcactccaccccagttgataacggtttaaagatgcttacattgaaggcgatcactaaaaaaaagttatactgggaacacccgaagaatgagggggtggacagctcccaacggattaattgcgtgaccgtaacgcgtaactgcgcaaccttcgtgctacacgagccagaaggatgtcgaccgagcaggttcaacggcaactttcagactgaggcaggaaatgcacatcgacatcaacaggcccatccaccagcttcagaaagtgaactgcggcacgcgcgatattcatgggtgtgggccacgcccttgaatcacgcgggccacagttctcccttatcacggcaatcaccaccggtaccagcaccagcgttttataccacaggtgttcccagccaagtcgaagacgacctagtttaagtcaaagttagtaaacactgcttttttcgacacgggaacccttgatgatcgccattgtaggtcaatacttacaactcggcgaatcagctaggacctggtgggtgatttacggataaattaccagctccttttctcgcattggagatacgcgcgatcctacgtgcgcaggtactattgcattgtacaaatattgtcagcgttatcgttttgactaaagtcgtgaagactatgaggagattcatgcttcaacccttgacaaaaatcaaacaaaagtgcgtacattttttttcaaccagacgctttgggacctgttcgggacacccatccgtctggaggttgcccaacatgataaataccgtcagcttcttcgatccatgtatctttatcctttgcaattccgtccaacagtttctaatcggtagacaagaatgacttgtttcagggaatgtatttcgcgactatatgctgttacttctcaacgcaatgggcttgcaacatgggcccttgatacagtaccacatgtattcgagtatagaaaaaaatctggaaatgaaggcaacagcagcgctggcaaaacgcccttcaagaccggccaagccaatagtttcgacagttcaaccactcgctttcacttgcagtaggaacctcgatggtagttagcattgatggcatacacctgatgggattggtcgtcagaaggcgctcggagtggaaaaaagagtctgtggtgccttcggtgacgcttttcgacagaatagctcgtgcttagcgtgttatagaactgacgggcttgaagttttattaatacagttgctctaacggatcgcaatccgagcaacataacatttcgtaacccagtgtaaccccattaaaagttcgcagactgtcgattggggaaggtttttggatgacatcgaacgacattcgcgctacattcgtagcttcccctgccggcggatgacatcgaacgacattcatgctacacgggaccatcggcacatcatagatagataaaggatattgaagccgactagaacaaataataaaggtgtgttgtagtgtgtcctgtcactgtgcggcggagcatgactcagagctggtgagcagcggctgcgtcgtgatcgacttgacgtagtcgttcgtgtggcccaccaaggacaagtcggtggcggaggtgtacggcgggcggcaggcggtggctgaggcgagtcagtcggctactgccaccgccacgagaaccaagttgaagaggggagtctgcagaagatcgcaggagggcgacacgtcggacagggacaaggagtgagtgtgcgaggaggcgaggcgacgtgagatctacgacgagcggccaggaggccacgggagcggtgatgagacgtgaagagggagaggtccaggtaggctaggaaggcgcccaatgtgtaggagaggtagaagtaagcggggacaacgagctgcggtctggcagctcgactctcagttgagatttgttgcagaactgtagcaggttgagactaaatacattgcgttgcgaccgaaggcacgggctgctacgttagtgctgagcgagggcgacgactagctgcgggcagtaagaggaagtaagcgaaggtaggcaggcactaagataagggggcagtggcgagtagggcggcgggaccgtggagagagaccacgggggtcgaggtgcacgagtagcgccttgaccgaggggcgcaagggtccgcgtgtgccctcgggcgaaggacacctgcgtccgctgcacgttaaccggattttgctggaagcagccggcggggctacccgaccgtcggtgccgacaacgcttcctaccagccatccctatccccgtctgggccataagctgtttggtcaccactgtgcggccccgtgccggttagccgccggcgctaatgctttccgcctaggtgtcggcgagtaggtcgtcaatacaacgtaatccgtccgtgagctgacgacccgtaatgggattggaggcctagcggcgggttacctacatggtggtcatacaggggccttccgggctagaacacgagcggagtgtcttagcgggcgacccgcagcggaaacgataaggaaacgataagagtgagacgaagagagcgagtgagctaacaaaggcgatcgtgttatttgaaacagaaagagccaagaacgaccatggcgactcagcgagacgaacgagcggagcggcgcgctgcgtcgcaggcgcgagcggcgcgcgaaacagcgaaacagcaacaacaactgacggcgtccacgacgctggaaacggaggacggccagacactgctcgtggagacggaggtgattcggccggccacgggcaacacgccgacgaacgcgagaaccggacagccgaaccaaggaagagcggacagcgacacgatggtgagtggccgcggcggttcgggcggcgacgtaaccaccgggagccgaagcagcggtggcggccacggcacagtacccggcgcgcccacgggcgcgaacacgacgatgagcatgacgcagagaacgggcgcggagacgactgcgagtacggcgccggtgacggacccgagcgcaccgatgatgacgaacccaagcgcaccggcgatgacgaacccgggcgcgacgacgaacgcaggacgggcgagaacggtggacttgactgggactggcggcgatgacgaccggggcggtgacgaactcgggcgcatgccaccgacaccgggcacgacatcagcggcgagatccgggggcttctgggcggacgactacgcgccagcgcgccaggtgatcgtgcgcgagaaggcgaaggcgctgaagctctcgaagttcaaggggttggacgacacgatgccggtcacgatgtggctgaagacggtccgcgccgaggtccgtcgacaggctgcgacgatgggcgtgcagtggagtgacggccagctgtaccatgaggtggctgcgcacttggacggcgaggcgaagaggtggttcgcgacggtgatggagtccgtaccgcccgaggaggagaacatcaacaccctcgcgggcatgctgcgggccaagtacatgacccaggacacgacccccgaggtggtggaccgcctcaacgcgagaaggcagatgcggggtgagcgcctggtcgagtacgctcaggctttgcgggagatcggcgagcgaggagatgttggcgagagctggctcgtgagcgccttcatgaagggcatgagcagcaccgagggagcgacacacgtgcgtggacaccggccgaagacacttgacggggccgtcaatctggccgtcccccacgtgggtgagtacggcgagggctacggagtggggctcgagacggcgacgacacgctgggacgacagggaggcccagtacgggcgcgggcccttggcggcagccaaggtgacgagtgggcaagagcagtcggggcttcgcggcaactcgaggaacgaggtgactgggtacggcccgatgtggggcacgactcagaagccaccaaggtacgataccgaaggaagaccggtatcgaccggtggagccagtgcggatgaatggtggaaagccatcccgccgggattcacactggtacctaccggtaagggagccagcgcgggcagcggttcaaaatttcaaacggcgggcggagatccgttgggcacgcgcgggaaacggcaaagtaccggcgatcagaatgaccggcggcccgctaagacgctcaaggtggaggccgccttcggcggcggtactcaggcggccaggcgagctcccaaccccacgctggcgacgcgcgaaggccggctgcgcaacctggagcggtaccaagcgcgcgttcagcatacgcaagccggaggaaagcctgccgcgccgagacctggcgtggagtgcttctactgtggacaagatggccactacgcgcgagaatgcgagctgaagcaggccgatctggccgctcagaacgcaacggccgggcaaaccgaggaggagaacaacggatcggcggcgggaaacggcccgcgagcgtactggtcccggccttacagctcgcagggtctgacccggggaagacgcgaggaagcagagcggcgcacgcgcgaggacgagagcgcagcggccgaggacgacgacgacgaggagcggccactggaggaagcggtggtcgcggtggaagaggcgcatcgagagcagcgagtgcaaggagcgcgggcgcatgtcgcgccgtgcctggcactggggatggcgcggcaggggtgacggcggtgacgaacgacgggccagcgacggcatcgctggcggacgaggccacggacggccgtggcgtcagacgcctcgtgcgcgacgacggaggaagtgtcgactggggatggcgcggcgcacgcggccaccaacgcggaaggaacggttccgaagacggtgtccgtgacgaagagcgacggcgacgagaacgcgggtaagcgcgtgaggttcgcagtgacggagatgacgaacggaggcactgagaccgagggcgacgacagacgcgtggtggtcgacacgcgtgacctgttggaggcgtgcggcttcgaccgcagcggcgtccccagcaaggaagagctggatgcgcgagtcgaggcgcaattgcgcgccgtgcagcggttgtacgaggagggaaatggcgtcgtgacatccgctggcgccatgccacgtgacaccaacgacgacgaaccgaaggacggcacgccgcatgtccaagaggtggtgacggaggagatacgggtacgcgaccttgccaaggccaaggtgctacgcgtacgagccaaggatgtggagcagcggcgtgcagccgaagtggaggcagcgcggcgagcgcgcaagcgccagagacgcatcgagcactcgaaggctcgacgacaacggcaagacgaacggaggcagcgagaaagtcaccgtgacacggacgacacgacagggtcatctgtccgtgctggcggtgaggcgagcgcggccgaagacccaacggtgggcgagagtgacgaacatgctgcaggcgagacggagctgcggcgatcgcgaacacgacgacgttacgagaaacgggcgcggaaggcacaggccaaagaacaacgcgagctgcgtgcagcgctcgtcaggacgcagcacccggcaaacgtctactttgcgttcggagagcagaagagcgctggagaaggtaggacgatgagctgcgcggaggcggaagcgacgggtttcacgccaccaagggcgaggcgagtctcgatcaaacgaggggctcgctcgaaacacgcgaagcagtacgagtacaacagcgggagcgtgtacgcgcactcgtacgtcaaggcgatcgacggcgagctacgacccgtgcgcgtgggacagttgcgggcggtgcaagcgccgaccgtggactcactgccgacagtgaatgtgcgggtgcgcggcgagcagcgggtgtaatgggcctactttggctcactactttagcttacacgggcgcacacgtgtgtgaggaagcgtagcgtagtttaaactagagttaattatactcgggactccgagtatagattaatctaaataaacgatccaaataatgttttgggttataatgagaactgctatttttgttttatgtctctgacttcctctaaatgtaatattctaagataagaatctgccaacggctggttggcagaattccaatgctgtgcatgtcgctcattggctaagagatgctgctctcagccaataggaatcctaagtctctatggaccacccgtcgtggtggtcgtaaatgtatgtagcctttggtgtgtctacaccaaggtcgagaaagtctttcgaacctctaacagacgtcgtgtctgttagagttacaagtgactgtagccacttgtgcgtgtaaccctgttacaccatccccccctcaaggttagacgcgccgagtcacggcacgtcaatcaggaaattgaccattcgtcaattcttcacgttgggagaaagaaaactcgagcttattccgcaatgagcttgcctcagaagaataccgacactgcagcagaggggaagtcctccgccgggatagagactctctctatccccgagtaccgcgagcgtctcaaagcaaagcgtgacgctcttgctaccaaggctgcggcggggacaacttaaccagagattgccctcgaaggttctgctgcagtcgacgacgccgttgacttcgacgacgacgtggagatggaagagggcgaggcctcttctagcaagcgcaaggagtctatcgacagcgatagtctcgacccgcatgccgggtcgagacgccctcgtgaaggagacgactcggacgcttcgagctcgaagcgttcgcgcggcgagagcgacactccgctctctgctgctggggctttaagctccccacgtgatgtggtgacttcaagttctccgcgcgctgctcaggcagcgcgcgatccgtggatgccgtctgcgtcagagatcgctgaccgcgtgggcaacactgtgcctccaaacgaaattccgctgtacgtatgcagcggtatccgcgacgatgctgttgcggaggcgcagcactttgatccgttaacgaatcaaaggcgcgattattacatcgggctcttccacgagctctggtacttctccagcaagaagacctcttctcgcagcaaagtgcctgagtggcaggcactttgtcaaagttggaacgcttttgttgagaacttcaacaagaagccggctgcttaccgcgagcgggttaagcatgcccgtaaacgcttcgagacattctcgacgcgcgggaggctggagcagctccacagatcctctgtggacgctggtattccatgcgctgtgcccgaaggcaatcagtgcacgttgtgtcttccgggtgcggtgcgcttgagcgaccgcgacctaaacgggtacacgacgattcgtatacctgagagtctcaaggatctccgtgccaagttcttggcacgcgaggaacgcgacgatcgtggggcttcgggcgctgtaggtgaccacagcgctcgcactaccttcgcgtcggcagtgcgtggtgagcttcgtacgccctcaccatttccggaatgtcctgcaacaggacgtcctgcggctcccatgtatcttggtggggcggaaaccctctccaacgaatacgataacgaaccggctgacggttcgttttcgggatactatggttcacaatacgctcaacaatccagcgtgttgagccgtgggcgtcgcggatcggaggcggcggtggtgggaacacgccccgggtatggtcaacctggggttgaccttggcccgacgctcgaggagcgggtcgctgctgtggagcagcttcagagccgtgagtgcgccgctctgaagcaggagatggcgaccctgagagctcaagttgctcaggcctcgcagaccgcgtcggacatctctgtcgacgtgggaggtcgcgtcgcacgcttggcccagcgcgttcacgcgctggagcagaggttcgcttccgctggggcttccgcttcgggccagccgagctaggtggctcgtgctgccggtatggcttcagccgcccgacgtaaaaggtcggatggaggcgcatgctagatggaatatctagcgtgtaggcgttgccatgccgtgccaacaccgtgaacggcccgatgaagcgcggagcaagcttgctcgccccgaagtcggaaactgcatgtttaggcaggttttgagtagctatcaaaaccaatgaacccttctcgaattcatttgtgttgcccctgccaacgttgtctgcgttcatcttctgtcgatcaacagaagctgctgtagcgtcttggacaaaccgaatgacggcttgtctgcgctgcacgaagttgattgcgtccgagctgaactcgttcagctcgtttctagcagtaggcccggcctctgcgttcgtcttcgcggtgtctgtgccctgcacagacccgttcttcttctttttcttgctcttgtcggcgtctgtgcccggcacagacgcgtgctgcttgttcttcttgcgcgtagtcgcggctgacactgtgcaagtgccagcggcattctgcggctgctgcgttacagtcatagatcctcccccacttaaggaaggagtcaccatcccgagtagactcgggaggcgtgggtgcctgatggcattcacgtagaacggtgtatgcccggtcgaggcatgcaccgagttgttgatggcgaactccgccatcggcaggcactcgctctagtgttggaacgagtgagcgtagctcttaagcacgtctacgagcacgcggttcacgcggtcggtctgcccgtccgtctgcgggtggtccgcagtcgacatcgaaagttgactcccaagtagtgtaaacacttcttgccaaaggtgtgcagtgaagcgcgggtctcgatccgacacaatgtcgatcggcatgccatggtgtttgaacaccatgtcaacgaacagacgcgccgtctgtttcgcagtcacttcagcgggtaccgcagcaagatgtaccatcttgctgaagcggtcaacaaagaccacaacgcccgtgttcccctggctgtccgggggaagaccgaacacgaagtccaaagacatggactgccaacactccgacggagtcggcagtgactgcaagggagcctgcgcgaaaggcgcaggcttcacacgttgacaaacctcgcaagcacggacgtacttgcgcacccatttgtactggtgggcccagtagaagtctcgcgtgagaagaaggtatgtcttctcacggcccggatgccccgcagtcggtgcatcgtgatactcgtacatgatcctgagtcgctggtcatgttcagtgggcacgacaacgcggtccgcgttgtcgtcgactgcactgtagagtaataacccgtcgtgcacccgataacggtgtgcacgagcacgaagatgcttcggcagcttctgacgagctatgtcagaaggcgctgagccgtaggccagcaagagcttcgcgtccgcgtcgtacgcgtacgcgaccttcacgtcgtccaacagtgacgacgttggggtgctcgatcgcatggcgtcaatggcattgacgtcggccaccacattgagtcttccgggtttgtactcaacccggaagttatactctgcgaagaatgagagccatctcgccatccgttgcgagatgtgcggcgacttcacagccgtccgtggtccttcaaagattgaaataactaatcaaaaaaatactttaattttaagtagtatagattttatatttttaaatcaatttgtcaatccccatgaaaaatttgaacttaaagtaaaaaaatgatttgaagatattaataacattaaacctaaaagattaaatcctgtttatttaataatttttttaattattatattttttatattgatatatgaatacaggggggggtttaagtagtatcaggaaaaaccctaatccaaagaataccaacaataacatgtataccatgaaatcctgaaaattttaattacagaaccttcaataaaacaattaatacaaaaatacaatattataaaaatattaaaaaaataaaattttatcctatttttatttatgtttttttcttgtattaataaattcacccgtaaaagaaaaaaaataatttaaaaatgactacaaatttacaaaaaaataaaaatagaaaaagatacattcctatgataaaatgattggctttaaatttggtgaaatattttttattataattaaaattaccttaaatcgtttttttagtttacatttcactgagaattttatctttataaaattttattgtctttagaatctgaaattgttatattaaaaatatatcgtgttactcacccgttcgctatggtttaaaaacatttgacttgcatgtgttaagcataccgatagcatttattctgagccaggatgctgaatttttaccaacattttttaaactaataccagttattttaagtttttgttaaaacaggtatcttttttaaagaacctacatttacaaggatataaaatacttttaaatgtaggttctttataaaagatacctgttttaatttttaataaccattaaaaaaccagttaaagtaaaaagattactaccaatataaccgtggaaatacatagcaccgccaaaaaataaaaaaaagtccaaatgagaatatttactgatacaccattagttcaaaaagcacgtgaaagtgtattagaatttcttttgataaatcgtcctaaataaataattacaatctgattttcaactaaataaaataaatcctgaagcaaatgaattgatgaattttgatggaaaaaaccatattttatcaaatgaaaaaatagtttagtagtaataaaaatttcagtaatatttgtaaagataaaatattttaacatatgtttatgaagttccatcaatttttctcgttcttcaaatccccaaaaatatggtgtcatagccttgacgggttgcctctatttgtcttgaatgatttttagctataaaatctaatgcctgtaaatgtaaaaatccaggtgatttaattttacaacgattagcacgttaaaaaccctttgttaaagatttaattttaaaaattcgagataaattatttttttaataaaaaaattttttaaaaactttttgataaaactttagacagaccaaacaaataaaggtaatctatgaaaacttaaaccaggggctctcccttttgatggttgtagataaaaaatacataagtcctttaggaaatattcaacttaatgcacctaaaaatgaatatttagaaaatgttattaatatcttcaaatcattttattaagaaatttgagcttaaagttaaaacccaaggaaaaacaaaaacagcttctaaatcaaaaataataaaaagaatagaaaaatttataaaaaaaaaagttggaaaaattggtgatacaattctaatatcagcaaaaaaattacatcattttaaatattattcagaaaatattataaaatgatttgaagatattaataacattaaacctaacgatgagtgctaatatttagaatttttagatataacagccaacgtgttaagcactccgcctgaaaagtataatcgcaagattgaaattcaaaggaattgacgggagtctacacaagcggtggagcatgtggtttaattcgataatacgcgcagaaccttaccaactcttgtctcagtttaaagccatacctttaatattaccgcaaatcctttaatgacggttcgattccgtctttaggtttagctggtatgcctagaagaattccagattttccgataacgaccctcgtgatcgtgctgcatcaacgcacatccgattgcgaagtcggatgcgtcacacacaacgtggaacgggcgatcttggtcggccaccgccaagatcggcgcctcagtcaagccctgcttgactgcatcgaaggcctgctgactctcagctgtccaaatccactcgacgtccttcttcaggagctgtgatagcgagcgtatcatgcccgcgtagtccttcacgtacttgcacaagtacgtggccaagccaaggaactgccgcagttccttgacgttcgtcggcgtcggccactcattgatcactctgaccttctcagggccgacaccgttcttcccaacgagacacccgagcacgggtatctcgctcgccccgaagatgcacttcttcaggttcgcatagagcttgtgcttgcgcatgagcgcaagcagcttccggagatgcacccacgcctcccgagtctactcgggatggtgactccttccttaagtgggggaggatctatgactgcaacgcagcagccgcagaatgccgctggcacttgcacagtgtcagccgcgactacgcgcaagaagaacaagcagcacgcgtctgtgccgggcacagacgccgacaagagcaagaaaaagaagaagaacgggtctgtgcagggcacagacaccgcgaagacgaacgcagaggccgggcctactgctagaaacgagctgaacgagttcagctcggacgcaatcaacttcgtgcagcgcagacaagccgtcattcggtttgtccaagacgctacagcagcttctgttgatcgacagaagatgaacgcagacaacgttggcaggggcaacacaaatgaattcgagaagggttcattggttttgatagctactcaaaacctgcctaaacatgcagtttccgacttcggggcgagcaagctcgctccgcgcttcatcgggccgttcacggtgttggcacggcatggcaacgcctacacgctagatattccatctagcatgcgcctccatccgaccttttacgtcgggcggctgaagccataccggcagcacgagccacctagctcggctggcccgaagcggaagccccagcggaagcgaacctctgctccagcgcgtgaacgcgctgggccaagcgtgcgacgcgacctcccacgtcgacagagatgtccgacgcggtctgcgaggcctgagcaacttgagctctcagggtcgccatctcctgcttcagagcggcgcactcacggctctgaagctgctccacagcagcgacccgctcctcgagcgtcgggccaaggtcaaccccaggttgaccatacccggggcgtgttcccaccaccgccgcctccgatccgcgacgcccacggctcaacacgctggattgttgagcgtattgtgaaccatagtatcccgaaaacgaaccgtcagccggttcgttatcgtattcgttggagagggtttccgccccaccaagatacatgggagccgcaggacgtcctgttgcaggacattccggaaatggtgagggcgtacgaagctcaccacgcactgccgacgcgaaggtagtgcgagcgctgtggtcacctacagcgcccgaagccccacgatcgtcgcgttcctcgcgtgccaagaacttggcacggagatccttgagactctcaggtatacgaatcgtcgtgtacccgtttaggtcgcggtcgctcaagcgcaccgcacccggaagacacaacgtgcactgattgccttcgggcacagcgcatggaataccagcgtccacagaggatctgtggagctgctccagcctcccgcgcgtcgagaatgtctcgaagcgtttacgggcatgcttaacccgctcgcggtaagcagccggcttcttgttgaagttctcaacaaaagcgttccaactttgacaaagtgcctgccactcaggcactttgctgcgagaagaggtcttcttgctggagaagtaccagagctcgtggaagagcccgatgtaataatcgcgcctttgattcgttaacggatcaaagtgctgcgcctccgcaacagcatcgtcgcggataccgctgcatacgtacagcggaatttcgtttggaggcacagtgttgcccacgcggtcagcgatctctgacgcagacggcatccacggatcgcgcgctgcctgagcagcgcgcggagaacttgaagtcaccacatcacgtggggagcttaaagccccagcagcagagagcggagtgtcgctctcgccgcgcgaacgcttcgagctcgaagcgtccgagtcgtctccttcacgagggcgtctcgacccggcatgcgggtcgagactatcgctgtcgatagactccttgcgcttgctagaagaggcctcgccctcttccatctccacgtcgtcgtcgaagtcaacggcgtcgtcgactgcagcagaaccttcgagggcaatctctggttaagttgtccccgccgcagccttggtagcaagagcgtcacgctttgctttgagacgctcgcggtactcggggatagagagagtctctatcccggcggaggacttcccctctgctgcagtgtcggtattcttctgaggcaagctcattgcggaataagctcgagttttctttctcccaacgtgaagaattgacgaatggtcaatttcctgattgacgtgccgtgactcggcgcgtctaaccttgagggggggatggtgtaacagggttacacgcacaagtggctacagtcacttgtaactctaacagacacgacgtctgttagaggttcgaaagactttctcgaccttggtgtagacacaccaaaggctacatacatttacgaccaccacgacgggtggtccatagagacttaggattcctattggctgagagcagcatctcttagccaatgagcgacatgcatagcattggaattctgccaaccagccgttggcagattcctattttagaatattacatttagaggaagtcagaaacataaaacaagaatagcagttctcattataacccaaaacattatttggatcgtttatttagattaatctatactcggagtcccgagtataattaactctagtttaaactacgctacgcttcctcacacacgtgtgcgcacgtgtaagctaaagtagtgagccaaagtaggcccattacacagcgaaggcagcgaggacaggctacgggtgcaagtggcacccacccggaggcgtgatacgtctccatgcatggcaacaaggagttacagcaggctaggcgacatccacgagagcagactttccagcaacaagagctacaacaagttgcagcaggctgggcgacatccgggagggcagacttgtcaaaggtaagagctaggaggcgctggaaggatgggagacatcgtagctagctgctaagccccaatatatgtttctcactttgcaatctacttcgagctgcgcaagacgaagtttcgggctgtgcaaggccggggtgcagctcaacgatctccagcaacacaacaacctactgatccgcgaacttaaccaatgtgttcgcaagaatgcgctggtgtggtatgaacgttatatgacggacgactacagcgtgaaattgtggagtgccgcggaagaggcgatgaagcgtgatttcgagaaccgaactttgatgataaagtgaggaaccaacttctgacgatgcgacagactggagcttacccaggttacgtttcaaagttccgtggcatgcaacgtgttgtcagactgaatgaattgacaaatgaatcgcagtctgcgaatgcttcttggaatgggatgtgcaggagaaagcgccaggaaatcagcatggtgagaattcgtctggcaaaaagggccggagacctgccacaaagtcgtatcggagcggagcaagcccgaagccgacccagggtaataagttatcgggtaataatcagtcacatcagactcatgcgaacaaaccagccgctactctgtgaggcatgcatcgagaggaagagtgctgggtgaagcaccccgacaagaaaccctgccaattacaaagaaagcagcagctacatcagcagatctacgcgctactggagacgctcgcagtcggagatgaacaaccccattcgtcagcggctactgacccgtcaaactagcccgtccaccggagttcgagcactctggtgggcataacgatgagttgctcaaccaagtgaatgtctacatttcgtgaattgaagctgcatgatgaaaaaatgatgaacaacccataaaagtattgcatgaggacgaagaaaaagtgaacaacccagaaaaaatagtggaggacggagaaaacgtgaaaattgaagaaacaagtacgaaggatcgtgagctcttctgcttgctgcataccaggaacacagtacactgtccttcacaggacatttgtattttgaattccaatgttatcgatagtggagccagcatggacggcgtcagccctgaatttttgcacaacgaatagattgtgggctgtggatcaccacaagcatttggaaatcaccttagccgcgaagcagacgctgactgttccgactaagaccgttaggctaacaccttacatggacgagtttaagccgtatgagaacgacatccttgtgattgatgttcctgaagaacaagatatactactaggaatgccgtggctgaaaacaaaaaaccccgacattgattgggtggaggaacgcgtgaggccgcgagtgcagtcggacgaggcaaacaccgagtccttgagaaaaaaagaagaaacgacgacaaaagctcaaagtgaagatgcctcacaagccgaagcgaccggcggagctggtgggtggagaacgacatccagtatcggctccgccgccaaagaagagcggtgacctgtttacttgtggttattattccgttcagagtggaacaaccaagtacatcagtggtaaacagttccgacgtattctgaagaaaccccgacacatcgattgcattatcgtgatacgaccaatgacagaaaaagaaagtggcgatgaatctcaacaacctgttgatattgaatcctatcgggatcatccggcctattctgtgttgcgcaaacacaaagtagtctttctgcagaagttgccctcgtcctcgtgaatacggagaacatgaaattgaagtcgacacacaagaagcgctttttcgacgacaatggagactctccccagctcaagagaaggtgaccatgaactgggtagccgaaatgctggctgctggactaattcgaccatcgacgtcaccgcacggtgcgcctaccttctgcgtaaaaagccggttgggtggcgtattgtgcacgactaccgttccctcaacacgcatacgattcaccgaaccttgccaatgccaagaaaggataagatcattgacaaaatgcaaggagcatactggttttcgtgtatggatttcctcagtggctattaccagttccgagtacgtgaatccgatgtgccttttacggcgtttcaagcgccggacggcgcgtatgaatatctcgtgctgcctatgggactctccaatgcacctgcgacctttaatgctggcgttcgccgcatgttgtccgatttaagcgagatctgcaagtcttactttgatgacatttatgtctacacgaagtcaccaagtttggagaagcacttggaagcactagatcgtgtgttgactcgtctggaagagcaccgcttcttcgtgaaattgagcaagtgtgttttttgggtggacgaaataccatgtttaggagactatgtgggcagaaatggagtacgaatcgaccccgcgaaagtgaaagttctgcgagattggccactaccccgttcccgaagcgaactgcagtcgtttttgggcacaaccgtgtacttacaaagattttgcaaggactttgctagcgatgctgatcccttgtttgaccctttaaaagggcacggtaaacagcagctcgagtggtcagcaagtctacgtggccattttgactctctcaagaagatgattggtgcgactcccgttctagcgatccccgactttgatcgtccttttcatttaagaatggacgcgagtgatttcgcagttggtggagtcctctttcaagaggagggcgagggagatgaaagaagagaacaacccgtaacttttggtggacgtaaatacaaaaaaagcggctgagaagaattattctatgcgcgaaaaggaactcctggcgattctgtttggtctccgattgtggcgcatttacctgctggataaacccttcatcgtggagacggatcaccgctcgctggagactctgttcactcagaaaacaatttcgcgtcgagtagctcggtggtatgacgaattaagcgcgtatccgatcaaattccaatacatcccaggaaaagataacactgtagcggatggtatatcgcggcgaccagactttatgatagagcaaccagtgacacttgccgctattacgactcgacaacaagtgaaacagcgcatgaaaagtgatttggctagtaaggtgtggcgcggtatagtgaagatcccttcaccgcttcattacagcagcatctgagcggagttggggagcgtagcaagcttcaagtaagacacttggagaggtacagcatggcgaagaagcgtaccttctatcacgcgccaagtgacgagcacccgcggcttgttttgccgaatattcaagagattcttgagggtgttctgtacgagttccatgatggaaaatgttagggacacccaggcgtggagcgaacgctacggctacttgaaaagcagtattattggaggtacatggagcgatccgtccgcagctatgtgcaatcatgcgaagaatgccaacgcactaagaatcggaacacgaagacacctgggcttctgcgctcgcatcgaattcccacagcaaggtggacgcatctcgcgatggactttattgttgcgctaccagacaaaggatggcttcgattatggtcctgatagatcgcctgacaaagcgcgctcattttgtggctactacgactgttgcaaccgcacttgaaacagccaaattgtatcgagatcgagtgtttatgctgcatgggctgcctgaggaggttttatcagatcgagattcaaagtttacatcggcagtctggacaaatctatgtgagatgcttggtacccggcagaaactggcaaccgccttccggcaacaggcgaatggagtaactgagcgagttaaccagacaattgaaaactatccacgggccttcagcaacagcaacatcaatgattgggatgagctgctagccgtggctgagtttgcgtacaatgcgcgacaccaggcctctatcagcatgactccgtttgaggcagatttggggtacccgctagcgacgccagcgtcattgcagccactggaagttagcacattatttgctgtacgtgctgctcagaaacttggagaagaatttgtggagcatcgaagggacgttttagcgaaggcacgacgagttctgcaggcttcgcaggaccgaatgagcaattactacgataaaaatcgacctgttcagaagcttgaagttggagaccgcgtgttattgtcgacgaccaccttggatgcatttcacgcaggcactacgaaaaagaaattagggccgagatagattgggccatacgcagtggcggaacagatcggacacgattactaccgtttggagctacctacgcgagtgaaattccatcctgtcttccacacgtcgatgcttaagccctatgcgcagagcgaacgcccagaccagacaatgttttaggttctacttcctgatgggactgacggtgagctggttgaggattttgtgggttatggacggcgcagcggaagtaaggaataccacgtcaagtggctggggcaatcagagcttacgtgggagcccattggaaacctgcaatacgttctggacctcagacaaacggaaagcctcgaaggctacggctcgagccccgtagcgaaaccatctcttgtgggaaggcatgtaatgggttcaaagcaagattacggcacatgtgaatcgtcaaggaaatcaacttcgatacatacaacccatggcagatgcagaggcacgtatccagagcgtttccgtggcacgggcgcccacatgtgtccgttccagacgcgtccctttggcgcctcccacaggccgaggtacttgttgtacacacctcgcgagatcgtgaggcaggccagcttctcttcctccgccacgtccgtactgccaacgcccggaatcagcgccatgtgcccagtcgatccgttcgccggcaccacgtacgtgtcaggtgcggtgacaaacgcctggccgatgttttccataccttgcgccacattgtcaattgggtcgttaacttccgttgctttgtcaacagcttcctccagcgtctcgggcttctgtcgctgctacacgaggggtcgcgttgtcctatccaggctgcggtagaactgtgcaagcagcacacgttctcggatgcggttgttgtcacacaggtcgcggagagcagcagcgaagtccgcatacgtctcaccaggcatccttcatcgttggccgatacgccactcggccatcgccttgtctggacgctcaccgcagcgtccagcactgacgactttaacttcgtccaggttcgatcgcgtagcttccggtccagctggacccaccagcgggtagcgctgtcctgtagcttgttgcctaagttgtaatagagttcttgatccgtccattcacctcgtcctgacagccgtgcgccttcccatgccatgtccacgcgcgcgatccaggtcgtcacagatgtctgcggcgtcggcaggaacgtcggcaggtccaggtcgcggatagcacgtcgtcggttgcgatggaagtcgcggtcgttcggtctcgtgataggctggcgccgtgcacgacgtccacctccatttcggccaccatcggagtcgtcgtcgtcatcggagctactcgaggactcgttatcgtcgtcgtcgctgtcatcttcgtcgtcatcgccgtcacgtggctggtagaccaccttcctatccgtggcagctagcggagcgttccgtggtgcagctggtggcggtgcctgctgcgtcggcgggttcgtcgtggttaccggctgctgcgtctgctccaccgccaccgtctgcgtgtcggtgtgtgcgggtacaggggatggcgcggggttgggagccgtggcgctcagctggtccgggctcgcgtcgatcctcgccatcgtggttgccatctgctgcagggcagcggtcagcgctgctactggagccatcgctgcgccgtcgccgttgccgctggctgctgcttcgtcgggtggcgcgtcttcagtgtcgtggtcgtctcgttcctcccttgggttgtcggcgtcgtccggttcgttctccttcgtctcttcgtcctcgccgtcttcctggtcttcttggtgcaccaggtccgatcctccagcgggtgcgggatcagacgtctgaggctgagtcgtcaccggctgattcctcgtcgcacgggtcgagggttgcatgacgaccttcgtccgagccatccgagcttcttcaggcgtcttcgtaagtcgagggctgcgtcgaatacgtacactaggcccctgtatgaccaccatgcaacgtgttatgagccccacacgtttggggtttggtcgcgactgtgctgatgcagtccgaagtccgtctggctgtcagtgtccaagcgtaagatactgcgccggtgcgtgcccgactggcagcacacctattttatttagatgaactagtacgatgcaagccaccgactaactacaatacacgatactttacgtgtacaacttgagtgccgctcgtacgcctgctatagccactcggatgtacgctcacacgcgcctaccctactcgtcgcagccgtcgagacacttggaagccacgtgcctcctagaccgtcactccgttgccgtacacgccgctgtagccgtccaccgaggtcgccgttagcgtccaccgccgttcgtccaccttccgtccattcgttgctagagtgctcgccgccgaggacgtgttcgttcggcctgttcaccagccgtccaaaccaaaagccgtgcagcttgttcgctagacgccgatttccaaagtgagctatgtcgtggggctcgcagagcccggaggtctcgaggtcctcggggatcccgtgcagcagatcctgtcgaccacacggccgaccggattctcgttccacgctggcggtgacttcaacgccgtcagctgccgacgtcacgtctgccgcctcgcactccgccgagacgcctgccctctacaactcgtttgcctctcgttgttaaaatgcgacagtattttttaataatacttaatatctacaaaaaggtgtcgtagatgaatttgctgcttctgatgcttgtgcagttcaaatattcgggagctcctttactgcacaaactacaaccaacgcaggtgttttcgtgtttctgtgaagaaatttaccactttatggaggtacgggtacgtgatagttttgaggacagcctacgcgcccaggtttcccaggttagaaaatactcagatttctgattctgcaggtattgtccaggtgatgcccaggttatatccaggttatatccaggtatatgagttatgagcgttatcatatgaaagtaatttaaacaaggatggttaaattaccagaacaggtaatgttcaggtggaaaacctggaaaactcatgtgcgtagtacttgatgaaaggtacttcgctgtcaatgcacgtccacaatagacggcacgcaaacaccccgcagctatcgctatctgtctgcttcggctccgtcacctcgatgttgctgtaagcttcttccttcaggggacctgcacggagatcgctagccatcttcttaagtcgcttcttgtttctcttcccacccatgctgtcatacgtcctcacttgccgcgcttcacggtccactacgatgcatcccccaatgaaccccaccaaaattgaccagcataaacacaaaagcatgcgcctcaataccactagcaacctcgtccagtgaagttggcgtgagtatgtgctttcccatcttacccgtcttgagaggaggaaccatcaccgtcacgatgttctcgtaagtagacataaacacgctaaacgcccgcaaggcgttgtcgttcagccaagcggagtctctgaagcagaaaaggtctgcgtaggtcaggtcgaagccaaatgcaagtagcggtgtgtatggccagtactcgagaactttgcgaagtgacagcctagggggggggtcagctacgatacctttcacgtcttggctcagctgtggtgaagtggatcgaagattttcagggacatcgccagcggcattcggtcaggtaatgtgtgccatcggatcctatatctgtatagctaaatctggtagagatgggtacccagatcttggtacagatccaaaatctggatactggttgatatggaacagagtatagagtcagtagagggtaggatccaaacggggtgggaaggcaggacataggctaacataaatcagagtcgaatttgcttgggaaccacatacttggtccttagtattgggattagcatcatctggctcgctttcgtgagttgtatcctctccgccagaagtactaggaccaacgttcgtcccctctgttcctgggctacctccacctcctccaccgcctccgcggcttccactgcttctactgttgccgccaccaccaccagtgcatctcgatcggggcccgagtcgtcgaccagttctgcatctggtcgcacctgcggaaactgcaattgacgtaagtcgtaccaccactggtcaatctgcttcatcgcagactcgaaaccagtgttatcacatcggacaagcacgctgctgatccgaccaaacgcctactgcatacgccgatacttctcggcttcactcaaactgccagcactcgcagctgcatgccccttgtagatcttcgcaacgaacggattttccacctccatcaagtcctgttgcgagatgcgattatgtccaaaccacctattgatacgcatcaatgacaaaacatggttaatacttggtcaatacattgataaaaccaaataactggataacatctcaatactcatagaaaacctggacatacctggacaaaattgaagcgaatggggtgacgaaggtgcttctgcatactttccggtagatgattgcgtgcctgcacggaagcttcatagtgtgcgagaactcgcagtcgcacacccagccttccttctcaagaagatactctttcttttccctttgtacggtgatcgtggcgccattgtccttgaaaacgtaggtatcgacaacatcgggattcgcagcaatgtcaaattgcgcctgcagagcagcagctacccaccgcgtggtcatgcccaaagcgacgttcaactcctccgggtacgatgcgtctctcagagtacccggcatcccgaccttggactgatatgcttcttcttttcggtgctgatattccagaagcacctccagactagcacgcacagttagatggcctttcagctttcgtttcagcttaccaaataggctctcgacacgattattcgtgtggttgccgaagtgtggcaaatcgacacggtaagcaatcacccaaatctctcgacacgcattcccgttcttgtcggaatactcccatagctccagacgaccattccgcgaggccagactcttgaacgcatcccgacgccgcgcataatcttcctccgttctggagtatgtcaagttcatgatggtgggcttcatctgcgtcaaaacttctgcttcgtagactccataggtctgagatttcttgatggtgtcatgaagccacttgatgacatgaaagtggcagagaagaatccgtgcctccggagatttctttcgaatcacatcgatctcgcgcatgtccttgtcgacgatgactacccgcacgaaccgccggtgctaatttgcacgcttgaagtggtcgaggcactttgatatgtgccaatcgccattcgtttcgatgagggagtactgcaccggttgcccttggtcaaattgatccacagctacaatcgtgaaaaaacgggtagttgtatctattcacaaatgacatgtacccattgttaatacctggtttaaacctggataatatgcataaccgagttgggggactcactgatatgtctgatgtgtgcagtccatctgcagaacctccggaaagttgtctaccatcgcgcatgtgcccactggtaaacgaaataacaccagtatctcctcgttggcttcgtgaacggaagcaacattagcgggcgactctccattgaagttcaggatcatctccgcaaccgcgtcgtcatcggacagttccacgcctgcagtcataagtagtataaacatcagtacacgttgtggttatggctgtagccttctcgctttatgacgatgtcccactttccatctcggcgcaggacgactgtgccagcatctggaacggacactcagtgcggcggagcttgtgtgacgtcctcttccctgtcgacctctcacgctcctaccagccgtgtctgtagatgtacttccgctgatagggctccctctcattgggcacgagagggatttctgagtcagggagccttcggaagctgacctgcttacgcaagtatgcgttgcggcgagccacgttgatgacctccgcgatgacgatcttctgacgcgtcgtctccatgtactcctgtaacctgacgtctggcagtgcccacgaatcacgaatcatgctgagctttgaaagcaggtacgtggaccaggtcttcgtcttcgacgtcagaaaccgtgcgcttctttccccggcgctgactgcccttcgtcgttgatttcttctttttttgcgccctctttttcatctcttttatctccttcatcttcgtcttcttcgtcattttcttcatcttcatcttcttcatcttcttcatcttctccttcttctccatcttctccatcttcttcatcttcttcatcgacgaccttcttctcctcctcgttgtcgtcgggttcatcgctagtggatgcagcgccttctctggtcgcatgggggccgaacggcgtgggccgagagtcgcgggcatcttgcagcgcctgttatcgctgcgatctggttcgcgcgctggccaccttcctgcgcgcctcctcctcttgccgcgctcgctcggccatcggcgccttgatatgggccgttttgggagtgcgctccatggagctggggtctccagggccgagcatcgccgcacgtcgaatgccacgtggctggatttggcccccctcgaattggtggctgtgaggcaaaaactgaaatgacggtaataaaaaacaggataaattatccttggacaatacctgtctctagacctgaataatacctgttttgcaaaacctgggctagtagcttgccgtagttttaccgatcttatgtatgccgatgcgatgtcggcgtggactcaatacatatttctggacgacatcattgttgtcatgatccgcaaatactgcgcaataagtaggtaagtgatatctttgttgacctcaccatctcattgggattcttgacatcgtacctcacagaaagaatagttaacagatagaatgcgaaaacaagatattagagcatttcgttgttatttcataacccaaatcgctgggtaacacaacatttgaagcgtttgggcttcgcctaccgcataatattattagagcaacaggcttcggtgcggaagataaaataaaagactggatccacagcctaatcacctgctttcccaagaacacatgggtcacccgcaaaacaacttattttaagatacttcaaagtacatgtagtattgttttacaaattatctttaattattttaaagaaaaaaacttcggaattatgaccccatccgctcatccgctctagcgctttttcttgactttgaaaagacttacgatcgagtcatttgggaatatttatttctagagctcgtaaaacttggctttgggatttattttatctcaattatccgactgctgtataacaaaccgctggcaattttgatgctcaatcgattcctactccgtccgctggaaacgacccgaggagtgaaacaaggagaccctctgtcctcgcttctgattctgctttgcattgaacctctcggtaatcttataagagcactgcaagacttaggtatttgcatatccggatcaacacaaatttcaggactatatttcgttgacgactcgacgctggtctccagttgtattcgcggaattaggaagcaacttgaacttgtcgaggtctactgccaaggttctggagcaaaggtgaatctacgaaaatcagcgttggtgcccctcaaccgaaaagcaatttacccattcgcctcagaagtacggtgcatgaagccatccgatacagttaaatacttggatatctcgttcggacagcaagtgacgaaagatcatatcctcgctgaactcaactctaacatttttcgcagttttggcgtttgggcaagaacagcaagagcatttcgcggccactaccgcagactactccggatttccagccccgacattcgtaaataatagagcgggttctgcgataattacggcagtccaagcacttaggcgcgttcatccaaaggaacgcaacaaactttcgcacacgacatgtacaacttggtctcacataccacgccggcgtggtgtttcgcacagtggggtggattagttttattttcattatctagtacgactagtaccagtacattgtatctgtccaaatcgagaaggacattaaatcggcaatcgaaccattcattcagtgatatctcccttagtcgcacaacttctggtgtcagtattatcatccaccagttaaatctcaatctctataacagccgccagaatcttgcacatgttaacctggcaggtggtcttttcaaggggtgaaaaatcattttgaagtatcacaaaacctccttctgaagctatctgtatcacacctcccagcgtccgtcagtgctttaaaaatggatacgatgtagtaactccaccagtagcggttaattgatatctcttcggctgcttctcttcagtctttggcggtccaaaatccatgtatttaatttgtagccacctaggattacactttaaacgtaacccaagtgttacgtttttctagagctgtgtaatgttgaatgataaagatcggattgagcactagggctccgcgaaggctggcataggaggattttggtataaccccttccttttttattttattaattacatctcctgcgcctgcttcgcagccgcagcatctgcccggatatttgccttaaaactgtaatacatgcaagatattatcatgagacacagcagcacgatggcgcctgttcggccacattttgcgccggcccgagatcccagcgtacacccagatggctgcctacttcgactcgtcgtccaacggagcctggcggggacgcccacacacgatactaccgactgtgctcgatgcagaccttatctcgagctgatacgagacccgctgtgtcctggagcagcttcggcagcttgcgcaagagaaacctaaatggaaagccctcgagagggcaatcatcgccgcactgccggcgaagaaggacccgacgtatgcggacaccaccttatgccgtcgactagcaaagctgagtctagcgaaaacatagtatgggaacgccaaaacggaatacagtacattagagaggtttcgggattgtcaccaccctcgcattaccctcaaagccatgttcagtcattagtgcgccctcacatttcattaaatgattttgatttgcatacgtttacagagttgtagtattaggaaatttggttggtatgctcattttcggctgaacttaataaaaggtacgagggaaatgtagggaatgaaatccctggatttgatgaaatctggggacaatcacggcgaggtgggcgcaaaagggccacaccaggtgcgaacttagcttaatgtaagggttatgaatggctccgaaacatctctattatcaggcagtgctttacaaatttttaaattcgaaccttggttgagatctgtttgtagcttgtagaaaatgtaaatgcttacttcgagtgtgcgattgtacagtccgcctcaagagttttggtttcaaatggtgaggtttgtataagccactttatcctacagcagtaagttaatgagctagataccactgtcgcttccgagcctacccatcttgtccgcccgccccatagttgaaacagtccatgcaacttctgcctaatttccccgcgggcagcatcgcggtccctgcgccccatcgtcgtcgccttccccccgaagaccgaagtcttctccactgcacttgtccaagcagatctgcgatccttgctgccgtatatgttgcaggccatcgtgaagcgcccctgcagcgcttttgattccccaaggcgctccgtatagctgccttaacactgtaatttctgccccaccgcgccatgaatttcgccggtatcacccccacgtcgcaggccagctccttgtgtcgcaggccacgttgacatacagtatgtctccgctcgtcactggggcactgaggatgggctgcgcgatgcacgggcagcgacccggtgaccgaccagggccgcacgcatgccagtaaggcatcaacttccaggtgggaccacggcgtcacctgtggcctggtttctacaggcaaacggcgcggaggacaacacgtctcccgtgggccccccacgggccccgccttccggctgacggtcaaagaccgccgcaatacgccgccgcacacagcggcgcagacatccagcttggtccgcggtgtcacccctgagctgcccggtagtggcatgcgagcacaccgaccaggtgcacgccgtccaccggagctccggtcgccaggaacgactggctccacaagggagtcgccgttgtccagtcgtggccaatcagagcgctctcgatgctcaccggtgcaatctgattggtcgaaccgctgggtcagccggctctatcgccggactgcccgctgattggccctcccggcggcttgagctccacggcgcagattgacgagtgacctcaagcgttctcttcactacgcttcttccatccgtatccagctcaatatctgaactgattcatatcagtatcgtcggtagcacaccggttcgatctgcccacgcatataaaccttttggagacccctgtgcggcaccggagtcgtatccgtttcaagaagatgtaccagttagatgtcaagagggatcatcgtctgacttgatgtaccatggatataatccgattttgtctgcgatatcatcactaacgttgcttcctatcccagtataaaaccttagtttaaaacagtttgccatttgtccaccactgtacttcgccttccgcgagtccaatctaaagctgagaccacacttcacaatttgcaccacaccacggcaccccatcgcgcttcagcgatacttccatcgtgtatttaccgatgcgctttattctctcagcgaaaagctgagagccagcaactttccgcggaaggccatcagtataaaactggttagtaagcaaaaatgacttgcataaagtatgggtttaaagcaggtttaagtaaatagcacccaatataaaacctcgcatttaagtaaacactcagagcaacttgaataaagtattgaccagaagaagtttcattcacttcaacatagtttcgttcagatcctctatagttccgaatccataatttgcgcatatatcgactaaaagctactgcttacgctgggatctctaaaaaaatgctttagcgccgcgatcacgtttaccgcgggagcgagtccacaccaggagtgcaggacaagctccagctcatcgtgccggatacggaggtgctgagcacgctcggcacgatcgagctgggcttgtaaactgtgtattttctcttccacctggtaaatcagggccctgacaccgtcatcgtgtacggagacgacgaccgcagctatcccgcgcagctgtgagagcgcgctgtgcactatacacaagtgtagctataacttgacgctcaggtattgggagtatgcgcgagcttttacttaactgtaaaagatctcgcttcacctcattacatgcacctaaactcgcggttgctttatcttactacaaagagcatcgttgctccaccttactacaagcatctacaaagagcatgctcgttctctgtgatgcctaccgttgtaagcaggtatattagcaggttcagtgtacagcgtacaagttcaccaccacagcattgcagtcgatatcacccaggagcgtaaagcttccacaagatgcatagtaacgcgttacgaacgctaattaataaagtgctaagctatatcggagcccttacgtgtactaaaatatttgatgaaagaattgcgacattcgcgacattggtaactacaggtttcaaatcttgcaaaatactgtatcatattctattacaacactaaaacgtgtacaaaatatcataggctctccagcgaagcacataggtcgtgatagtacgcgtggtactatttgggtgatacaatggcaacttgcagttacaattagaactcacaccgagtaggtgatccaatgtgatcgttagccccccaccagcagcattagcgacggaatatggatatggtcgccagggtccgtcccagatcaattgcggatacactatcgcttcgccggaggacccaaaagttggggtatacatgtcggattcttcatcgtccatcggggtatcggggtcttcttcgctcgtccattggacgtctcgctcaagacgcccggctcaccgtcgtcttccccgccgctcgggggctggtcgccaccagcagagacctctttcggagtgatcacagggtagtttgggacggggaccggaacatatgcattgctctgcacgggggcttggggggagagaactgggctgcccgggaggcccgagagatctggatgtcccggaacgatgacagcccccgctgggagcggagggagcacgatgcccggctgttctccctctgggggcgggggaatctcgaggtagggggcctatgtcatgagtggggggccctggccctccggaggcatcttgatcccgaagatttcgaagttgctatcctcgttcctgatcgcatccgccgacgtttggtcttgcgtcttgtagagggacagcacgccatagtccctgctcccggcagacttctgggcgattgtcagctcgtatgtgtacaatctgcaactgtcgatatcacagcggtcgccggtcacgaccagcgagctctcgcagccatcgaccgagatgaggtacgaagtgatatcacccgcgagcggagggagttgtagtgaaggcagaagcgcgagctgacggtgcgggcgtagttggtaccgctgtcagaggattttgaacagcatccggcgtcagaggaaggctcttccacgcggcgttcggtgacatggctctgagctgcttggtcttgacgtcgcggggttctgtgtcacaactttagctgagctctcacaacgagcgcagtctaaagtgcgatttggcagcacttgcagagtcagtcaggtcgttggcttagtttagttgacgtggagcctctcgctcagttagttgaggtcgtggagagccacacgtagctgcttggccagagcagataacaagaaactcaattgaactctttgtggttgattccggaatgagagaagagaagccgtcgtgcttcgacagcacttcaaccccatctcactcatccttactttcctcttagtaaaccgtcatcaatctacgctgctcgctatacataggctaaatccctaatcttgctcgccggtagctgcaccgacgacggcgaagcgcatggtgacggccaagatcgctcacagggcgaaagtgaacatggcagtggcgactggcgtggactatgacgaagagagcgacggcggtgaggaagcagatgctccacgtgcaccgccgcctcctaagaaggtgaaaatcgcggctagacggacgaaggctgcgatgcgccaagtcaaggcgacggaggcaccaaggaagacggccgaagcggctccggcaccaggacgattcggcgaactcaagtgttatgcctgtaatcagctggggcacttcgctcgcgagtgtcgagatgctgaagcccgcgcccgcagcgacgagtatctcgctcgacgtgagcaggacagaaagcagcaggaaaacgaggatcgggcgacgtagggggatcacggcgctcggcgatacgacggacgccacagcgaccggtgatggtagccatggacggtgatacggcgtgcacgacggacgtgccaacggagctggtgacggcgaccgacggcaaaagcaagatggtgaacagcaggaacgtgccgaacgacgggagcgtggcagtggtgagacgagctgtctcaattggacgaagatcttgcggttcgtgactaagagcgagcggggcggtatgtatgcactgtgcggccggcgatggcagccctgcggtacgtgcacacgacgaatgaagatgacgaaggcggcaagggcaacggcgccacggcgaagtgcgcagcggtgacggctgcagtggcctaggcgacaccgactacgaggacagcctctggccgacaccgaggaggtgtcggcctctgaggaaggcgacgaagtgacagacggtgaccgtcagctgaggaaggcgccgcgctgacgaacgacgaacagccgaacaacgtggtcgaggctggggaaggcgacatgtccgccgtggagacgacggacaaggacgagatggcatacccggagctcggcacggagctcacggacgagacgatggcaaagctcggcaccgtggcgaaggtgcgcatggccgtcagactgtcaaagcgtgaggtgaagcagcagcgtgtgcagcgtgcacgtgagaaggcgaccaagagcatgtgtggcgatgacgaagtcgcgcgtgttgtcgctgagctcgacgctgagcgtgaagagcggtggcagcggcaagctgaaggagcgcgcagcgcactggaagtacgacggcagcgacgagttgccggtggtgaagacgaagtgggcgagcgagcttgtgtgaacttggtgcagcacgggggcaccgtggcggccgagaatgatgatgacgatagcggtgtgagtgtggaggtcagtggcggactgccaacagctgcaatgttggtgggcggcgtgcaacagtatgtcaagatcgacggtggcgcgcgctacttcgtggcgggcacgaaatggatggcacgcggtgaacggaagcaggtggacgcccctgtgatgtacgtggagggtatcggcggttttttgctggacgtgttgggcgtgtggacgttcagcatgacgaacgtgtacgagtagatggagtggcgtagcgggatcagcaaaatctgggagattaccaatccaacttaccaactgcgcccgaacaccgacttacggaggggtggcccccgatgatccgtgatctgtgtgatgaactggtcaccttgtgtacctgtcggtagggctggatctgctcctctggcgtctgttgaagtgtccgagccttgaaatcagaacagtctgggcgagacgcggggatgtgggtggagcagcgcggaaatcttcactctgctcgcggtagtattccaaatccagtggtcttgtacctggatctggcgacctggatctggatccggccgtggggttgcctttgggttgttgttcctttcctttgcctttgcaggtcttcctttgttgtacttgccgcttcctgtagcgggatccgtagatgttgagagtcgaggatgcacccggccaagtagtaactccgggtggatcggggatctgcacttgcaagtagatcactaggaaggttgtagaactggccaatgtattatccagtctagatcaactaccagaaccttgctaaaccgtggggcctatgtacttcccgtttccaggcgaagccgaaggcacttgcgatggataaggcaaattcgagtctgctttatgcttaagcccaatcccatcccaaagtcctatcttgctatagatcatatcatcccatctgtatctactgactctatggggcttgattatcttccttgcgtgccgctagattgcctccgtcgagccataaccttacatccaccgttcagtcccatctgagtccgaatcagaatcagatctggattggatcggatcgccgatccacttgacagctgcatctcttggatcttgggtctcgaggcatggcgttgcttgggcacacattcgtgacgtccggtcgcactcgtagtgtcttccgttgcaatttctaacatctggtacggggcccgatccgccagtctggtggatccgtcgcggagtctggatccatcattctgccgatctccctttgttccaatttcttggatcctagtggtgactatcgacgcatgcatcgtcgaggggtgcaccagcgagttccttttgagcgtggccttcctcgagggccacagagcgaagatggacttcgaccgtggtgaggtgcgctaccatgagcgcagcagcatggtgatcgtcccgttaaggacgacggaggagacgaacgacccggcggtggcagctgtgaggctggccagtgctacgtacttgcaccggcgtgccgtgcagacggtagaggtagcgattgccgcgcctgatggcgcggaaggaattttcctgccaacagtgaacaatggagcggtgctgctcgcgtcagcactgaccaatgtgacgaacgggatggcgatggtgcctgccatcaacacacacggcggacgcatcaagttgccaagcagaaaggagctaggtgtatggatacctatgaatcaagacattgagctcttgacgatgcatggagagttggaccctgaacgtgtgaacgcgtggttggacgaactgggcgacgccgacatgcccttggacgacgaacacgacgtggacatcggtacggaggagccgaacgcgcgtgcgctcatactaaaactattacgtgcctatcgagacttggtgaatgcgcaagacgagtgtccgcctgcaacgacactcaacgtagagcaccatattgatacgggacacgcagctcccataatgatgagacggagacgtcaagtccagacggaggacgctattgtggatagcaacgtcgactctatgctgtcggcaggattgattgagcacggcgaaggagcgtggggggtttccgtagtgctcgtacggaaaaaggacggctctgtacggttctgcgtggtctatcgagccctgaacagcatcacacgcaaggatgtctaccctttgccacgtattgatgagaccttggaatctttgggcagcgcacggctgttcactacgctagatttgagatcaggttactggcagattcgggttgcagaggaggatcgtgacaagacggtcttcatgacgaaacggggtctctatcgcttcaagcggatgccctttggcctgactaatacccctgctagctttcagcggctcctgaacggggtattgcgcggattgacatggatgacgtgccttgtgtacctcgacgacatcattatcttcatgaagggcggaatcgaacggcatatggttgaactagctggtgtattggagagattacggtctgctggcctaagtctcaagctgaaaaagtgtacctttgccactacttcaatgaagtatcttgaccaccatctgagcgataagggcgtgcagcccgctgaacggctggtgcgctctgtacgtgatttcccgcgacctgtggacgcgacggaggttaaacggtttgtacaccttgctggctactaccgtaaatttattgcagccatcggctcgatcgtgaagccgatgactcgcttgttgaagaaggacgtgcagtgggaatggagcgaggcgcaggagttcgcgtttgaacacgtgaagatgttgctcaccccgcgaccttgctactctatcctaatttcgaactaccattccgcctagtgacggacgctagtaaagttggcttgggagcctgcctcatgcagggccacggacgcggctggcagccgattgcatatggcagtaagatgaacagtgaggcggagtcgaactactcgatcaccgagctggagtgtctcgttgtggtctggtccgtgaagatgttccgaccctacttgtacggcagagccttcacgatcatcacggaccatgcggcgctgaaatggttgatgcctcggccgaatctggctgggcgattgcatcgttggttgctagtacttcaagaatacgaatttcaggtcgaatatcgaccggggtcgacgaacgtggtagcagatgccttatccctggcacctgcagcggtcagagcagcggtaggacagcagcgacggcgccaggcgacaccaaggacgactgactcgagcggtacgtcgcctacgggcgaggtgacggcagcagctccgccgacacgtgctccagcggtggagacgacagcggcggacgccacgacgacgggcaagacgacggggaagacgactggatggatgacggaccggacgacgaactagctgacggacgaagtggtgtacacggagacatcaacgatggctccgaggcgacccgtgacggcaacgagtacggcggacggcatggcgaggtcgacgaccgagacggtgacggcggacaacaccgccagagtgccagtgcctgacgagaacagcgaagcgtccacgaccatgatgaccggctcagcagtgacggccacgaacggccgaagacgcgcgaagcagacggcgactgctgcaacgagacgccgtgagcgtcttcgcgaacgagaccagcgacgtgtgcactgggccgccacggtgacgaacgacggcgacacgacccgcacggcgctgagtgctggctgaacggaatctacggagactacggagacgatggcagctacgacgacgatggctgcgaatgcggagtcggctatggcaccgagccccacgccgacgtcagcatcaagtgtcccacgtgaccagggatcagctgtgccgcgtgctggcgacgcacaggacggtggacaccaccaggtgaccactccgacacgaccaatggcgacgagtatgtggagaagtgtgggtcccagaaaatgagtgacggcaggtgattagacgtttgatggatcaggatctcgccacagatgcggaagagtgaccgactcagatggaatcagagtcagatgggtctggatctacacccaatgaagatccaagatccaatctcccagatccaagatccagcgtggatctgggtctacatccgggcgcaaccaggaagttgtggacacgactcgacgggcaagcagctgacacgcaatgaaggtaaagagaacccatagagtcggtaagcacagatcgggtgataggagctacatggtgataggactttgggataggagcgaacttaagcataaatcagaccagaatttgccttgtacaacgcaagcgcttcctccctcgcctggaaacgggaacgacattggccctacacggcgtagagaggttagcggtagcagatctagtgttgattgcaagactggagtaatatattggccagatccaagaccttcctagtgaactacctgcaagtgcagatccaagatccgccggagttatctgtttggccggtgcgtccctctcgtctcaactgtcaacgacaccgtcattggaggcggcaaacacgaccaaggaagacctgcgaaggcaaaggaaaagaacaacaacaacccaaacgcaacaacccggccggatccagatccaggccgccagatccaggtacaagaccactggatttggaatactaccgcgagcagagtgaagatttccgcgctgctccacccacatccccgcgtctcgcccagactgttctgatttcaaggctcggacacttcaacagacgccagaggagcagatccagccctaccgacaggtacacaaggtgaccagttcatcacacagatcacggatcatcgggggccacccctccgtaagtcggtgttcgggcgcagttggtaagttgcattggcaatctcgcagattttgctgatcccgctacaccacaatggtgcgcgtgcccggatcggcggaaccgaggtggacccagacatggatccagaagagaaacctcaacctcctccacaggtcccttcgaggaccccggtggatcgcgacgaaagtcaagatccactaacaaaacaaaccaaggctggccaggatcggtatgcatttgctgactctcaagtgaaacaagagccctacagcttccatccagacaagacacagacaaagaagaccgctacaagaaggaagatgaaggcccaggagctggaggacaaagatccagaaacgtcgacccaggatggatccgaggcatcatggatccgtcatcacgagaagcaactacgcggctttctgacagtggatccaattatgcagaagttaggtgtgaagccgatcggagccctgcatggacccctgacatttccggcagccgttaagcgtccagaaatcttgcccgagatggaacgcctgatgcagctgctgagggaccggtctcgtggctggagcgttcgacgcgtcagtgatgtacgagatcgatccaatccaactccgtgccacgacggagatgttgttcaaccggctgaaggtgatggtaggcgagatccagccgaagccggatcccgcaatcccggatgctgacgagctagaagaagtccttcgtgccctggatcgggcgaaaaaccggcagaagaagtccgcgtatggatccagcaagtaccggcaaaaagcaccagcaacgcctgcgccagccgctccagctaaacatgtgcgtgcgatccagatcatacctgactcgggatccgagtctagatccagtgatggatcggactccgagtgcgacgaataccgcacgatatatttgtctgcctcccacgaccatgcgaaaccagtcgaggaagagccgaaagccctggaacggaaccctctagaccggcagcagcaagatccaacctcccgcgatcagagatccaagatccacgttgatgggtccgagcgaagccgctgtacacactgcggatccaagaagcacttacatctcggctgctggaagcggttgacgtgtgagaagtgcggcaagaagcgtcatccaggtgaccattgcctcttcgtgtgccatgggtgtggtgaactcggccggtgcccgatggaagcgttttacaaccagatccgccagtggttcaatccagtcaagcatgcgggcatgctgccagaaatggcggagaagatgttaaactaggacgctcgtcgggttggaatccggtacgagccgagcgtgctaagtattgcatctatgcatttgtgaacaagacatcgacagatccagttagcaaacgacaggatctacgcggtaatacatgtgatcttgatctgggaaacgtactgctgtgatctcaagccttcggcaagccgacgactactccagatccgacgcgacagtggaagtggacctggatccagaggctcgtcaaggctattggaagcagcaggatccagagcagtggttcaaaccagccgatggcgaagccacatcggaatccagatccaggtgtgacgctgcaagccagcggactgtagatccagagtactcgtatctcctacctggagaatcccgagggtactggaagcaacattcgccgggcaagtggatccgtcaggctaagatccacggcaagatcaacaatgagaagactatcttaatcatagataccggtgccgaggtgtccatcgtggacaccgcctttgctcgtaaggtggggtgctacatcgacaggagtcagagccaagaatgtgttgggatcggcgacaacgtgtacacaacggaatggagaacgcggatcaagattaccttaggtggatacctggtgtatttcttcgacatttgggtcggggttctgtccggccaagaagcgatccttggtatggactacatggtcccggccgggatccgactggatctagctgatgggactctctgtctgcctgacgaagtccgaatccaactcagcggccgccgtccgctatacagtgacaaggcgcagtcggtaaagctggatcgctatctgcagcttggggtcggagagtccgtggagctatccacgcgcctgcggggatctggatcggaacatgacaaactttgggttacacgaggagatcgatgggtaccaacagtgatcaagggcccaggcaagacacggtaccttcgaatcacgaacgtcggcgagaaggagttggtgctgcgccagaaccatcaagtagggatgtggctggtcggtgatcgggtgccgcggatccaaggttacgtatccgttggatcacgccgttacctggagtggcagaatctcgcgctgcaagccacgacggaggctggatccacggaggcggcgcctccagaaaccccgacggggccgatggtggagcgccctgagtacctgacgccgcgtgcaatactgcggaggcaggatccaactcaagtcagacaggtggaaccaagatccaagaacgccggggtggacggggcaagtcgcggccggatccgcccggtcaggcgatcgacgaatacatagctggggcggcggaggtgttgcagctccaagcttcaatcaaggcgcggacacgagaccagcgaccggaggagacgggcggacaagcacccggaggagatccgcaggccgaagactcgccggatcaagatccaagtgacgaggattccctgggagacggcgaatctcgcagtcaaccgttcgcgttacgtcagtgcatgaagattgacacgcgggaagaggtgcagatccagagcccatctccccagagcaggtcagatccacggatcttggatgtggatgggacgagccgacaatcggacctccgtcgaggccagatcccacggtgacgcaggacaatgggtcgattcgacagacgcaactgcacgcagctattgtccggatggaagaagcccaagatccagtgtcggtcatttggcccaagccggatccaggcgaagttcctgctgagcgccagccggatccagatccaactgccgatcgaagtgtcgacgacgcgctgagaccagacgatggaccaacgggccaagatccaactgactacacgcaaggtcgcgagggggcgctggatccagatgatgtgggacaggaggtctagcccgttgtcacatcgggtggtaagcacggagggacagggggcggatctgccgattcaacagatggtgatactggacaggccatggatccagtggagcttcaagtttcagatggtgagatgggacgaggcgcagatccagatggtgagacggcgcaggaatcaggtccgacgccagatccaactgtcgatgcagatccaacgactaccatagatccaagtcgcggtgacgctgatgcagatgagcaagtctgctaccacgtgagtggggatctgcacgcggaagatgttgaagcggagatggcggtgctaccggaagtcactgcgaccacagacgaggtgactattgaagacatccaggtgggagatccagaggttaatacggcggaagaaatcgatcgactccggcggcggatctggaggcgccggcatctgctgattggtaaaggaaacgcactaccacccgcggcacgaggagttgtgtgttgatgtgggtgatgcaaaacccaatgctcagcgggtgcgcaaggtagccccgcagtaccatgagaaactgtcggatctaatcaaggggttgctcggagccaagatcatcaaggattcgacttcaccgtgggcatctccaattgtggtgatcatcaagaagaatagggtagacatacgattatgtatcgattacaggctggttaacagtttgacccggctgatggtctacccgatgcctctgattaacgacctgcttgaggatctggacaaggtgctttggtactgctctttggatatggccagtggattctgggtggtgatgatgacggatcgggctcgtgtgatctccgccttcgtcaccacgttcgggctgttcaattggaaccggattccctttggattgaagaacgcaccccagatctatcagcggatgctagacaacgcattgtatggattcactcggattccgcggctggaagatggatcgggaccagcgcgcgaacttggatccaagcgtggatctggatcggaggcgttagatctgaggtcgggagaacctgaaggtccgggcaaatcatccgtactgggacgtcggtcgtatattgacgacattttggtaactggtggatcctgagaccatctgcgtgagcgtgtggacgcactactggacgcgtgcgataagtggaatctctcaatcagcgtggtgaagagcttctggggcaagcgtaaggtggagtaccttggtcatcgcgtgtcaaaggcgggactagaggcgaatcccaaggatctctcggcactaacggatctaccctttccaggcacacttagatccatgcagtcgttcctgggtagtttgaattactacagtcgctttctggaggactacgcgatctacgctggggtcctctacgaattgcgtgaagtggactacgccgcgatgagcaagcctgagaatcgaggccggatccaagcggtgatggcttcgactccagatccaacggagcagacctcgtccgacacggcggatctagacctaccggatacagactctggatccaccaaggctgggaagcgggagactctggatctggaggcgagtgatccaaaccgtgtagatccacgttggattcgcgctcatcgggcatttgccaaattgaaggaaaatatggcaatgactccgatcctaagacactttgactcggatctgttgccggtggtggttgtgtacgctagcgagtgggccatctcggctgccttgatgcaagaacatgacgggatctactatccagtagtgttcacgagtcgtacactgaagtcaaacgagctcaattatggcgtggttgagaaggaggtgttggttctgttgcgaatcctggatcttagtggttggacgccagatccaagtcttaactagacattcgacgttgtcctggctgttcagatctacgggtctacaaggacgattggggcagtgggcggccttgctctcgccgtggacactcgagattagaaaatgcatgaagggcgaagatgagatcctgcggactctggcgaccagtatcacccctagatccaaggtgaatcaggctttgatcgagattgcgcccaaaaaggagccgcgacgcaagatccaagcgccgatcccgaccgtccggccaggtgaagaactgtatgtggttagctttgacggatccgcctatgccaaacgtggcggaggcgcatacagcgcgatcctgtggaagttaccgtaatggactgtggtgaaggctagatccagctatgctgaggggcttaccgataatgaggcggagtaccatgggcttcttttatgtttggatctgctcgaaggcgagtcacaacgacaattggtgatctgtggggattccaacctggtggttcgccaagtccgaggtgagatcgactgcaaggcaccaggattgacccttctgagacagaaagccctggatcggctgcggatctggccggaccacgagctggtacatgtcaagcgcgactggaacggcagcgcggatagcttagccagcgcagcacttcagcgacaggccggtatcatggtggaggatgcggtggatctgcaggatctagtcacgttgaaccgcctagatgagatcctggttgtgaagcgtgaagaagaagcctccgtcgcgcatgcctcacccgtgacaacacgagcacaagtcagatccagatccaacccgagtgtattgcaagaggaagtagtgcgggatctcaggatcgccaggatccgccaagcgtaggacgaggaggcgtggatctccggtctgatgaagtacttagtgggcgatatgcaggatctgacccaggatgaagctagatcctacagcgctatcgcgacggactacgaagttgatctcaccgacctgctgttctattgccctcccacgaagaaggtggaggcggatcgcgatggattgatgaggttggtgctgctggagactctacaacaggatgtcctccaccattaccatgtcattctcgaaggaggtcaccaagggatcggccgcacctaccagcggatccggggtcgctttcactggagaggtttgtatcggagtgttcaaagatatgtcggagagtgtgtggattgcgaaacgggcaaaggacgacccacgatccaaggtgagtcgcctgggaacatccaagctacatacccgttccagattatagcgatgaatcatataccgtcgctgcccagatccaacaaacgtaataccgagttcttgatctgggtggatctgtttacgggatacgtgatcgcgaaggccagtaactccagaacagcgcagacaatcgcagagtcttacgaagagtgtgttttcagacgattcggtgctagcgaagtgatccggcacgaccgtgagccggtgttcgtggcggacttcttccaatcattcaaccggatcctgggtcaacgacaacgtgcgacgatggcttataggccgcaagcgaatggaaccgccgaacgcatggtacaaacagcaactcgcgctctgaagatgtacgtgcaggatctggatcagtgcgattgggatgattacgcggagcgcctcactttcgcgcttaatactgcccaagatcggatccgaggagaaacgccattttacttggtacatggctgggatccgaggtccacactcgaagccacaatcccgttaggcagtactcgccgccaggatcgggatacacggcggtggtgataccagatccaacgctattaccagcaggcgcgggcagaagtcaatatgcggctgcaggaggcgatctcggatcgggcggatcggcataatgaagagatccatccgcaccggatcaaagttggatctagagtctggctgtacctggatcgcgttaaggaagggtacgctcgcaagctggcgcatatgtggcatgggccattccgcgtggccgagaagataggcgagtatgctatgcggatcaagaccccgggcacggagtatcggttgttccctgtggttcacgtctcgaagcttaagctggtgaagaggtttccagaccggtcccggatccagctaaccgaaggcaccacagatcaatacgattttgacgaggcgttattgccggaggatagctggatccacgatctaggagaggacgagtacgaagtggagaaaaccacggacatgagaactgggaaacgcactcgttacggccggatccatcgtgaattctttgtacactggcgcggatatgaagatccatcctgggtggatgaagcggatctcaactgtgatgctatactacaagattttcggcggagccgcaccaaccggaaccggttcggtgtgatgcagtcccacgaggagtagtgggggctgcggtctcctggagtgagttggtcactttgggaagagagtgcggtgatggatctgcagggtggttgcagatcggtggattgagaattttgtatttgtgtatggaataacaaggtgttcgttgaacttgagcgaggtggaagaaagaagaatctggcgatgacaagggcgtctcagctgaatctggaatggagtgcaattatggatctggatcgcgaagcgatgtggtatggatctggatctacaggctcgagccgtatcggagtgtaatatttgtaatattgggtctggatcgcaatgaggtgtggtacggatccggatccggatctacaagctcgagctgtattggagtgcaaaggtggatcggggtagtgagacgaaaaaaaaggcacgaacacaagcgaaacgagtgtatgatcgccgactacaacatgcaaaagtacatccagatcctgcgtaattagctcaactgcaaggatctgtggatctggatctacttgagatctggcaccgtagatccagcccttactggtcgccaactgcacggagattgaagaacttggccgagaggcgcgcaatgttgcgcgcaggatggtattggggagtatcccggtagtggttgcgccatggatcctcgttgttacactcatccaacgcctccaagagatgcgtgggctctggccggttcaagttacgatccgccaaattagcttggcgctaggccaaccctgggtaccacgtgacggactcggcacgcttggggaaatgtaggaaatgtggattcagcaggatgtccaggtcacaccacccttcacgcatgacggtgatcaacaactccaagaactgcttcaacgcacggcccgcgagggatctacggtttctgcgttccttctggaacactattagccacggatatttctttgccatcgcatcggggatcggaaagtggtgggtcgactcccagtaggacatgagatagtgtcttcgaagatcccgtactcctggatcaggatcccaagtcgaccacccaccttgacttcaaacgaaatggcatcgcccgggttctcaaggatttcccaagggtgggtgtccaattgcgcccgcacgttctcttctgtgatgagttcccagcagtagtcattgagttggatcttcggcttacggccctcggcaggaccgaagtagggaaataaccagcctggagcggtgggcaggatcgggaacaacacgtcgatcagcatagtcaccatggccgcatcatttaagtggtccacctgccaaggttggcagtcggtcggcaccaacgcatgtgcgttctcgcgaccggggatgcagtccgcgtcaggtgcaaacggaactacaggagccagaagatcttgcaccggtggtcgacgggcacgagctgggggaagattgcgtggatcgggatcctgtggaggagttggatcgggatcttcatgcggatccgatccatctccatcgtccggggcccggccagcacccgaagacggccggcgacgaggagaagcgtgttgtcgccgtctctcttcggatcgcgactgggacagcgcctccagagtttgagcttcgaatagatcatttgccatggattcagtctcttcatcctcgccgtcgtcgttgccctgctcttctaattcgttgtgatcttcctcttcgtggccgtcgccgtttcccttgtcgccgcggtcgtcttcctggtcgctgccttcccctctttgggaatccgacagaccaccatcgtcggcgatttcgctacctttggcaggggacgagcagccgtcgcctcgatccaaagcttcacggctttccgattgcggcgagaagatgcgacacttagctagcggagtaggatctggatcgggcgtttcgcgaccccgatcccgcttggaagcacttgatgccatttgttggttgggtactggatctgaacagtcccgatccgaggtttccgcggtaggctgttgttcggcggatccaggaggcgccacacggatcaagctgaggatatacgccggattcaccacctcttcaatcgcgccgggccgagcatctgccagacgacttattgacgacagctgccatagcgcaacgtttacttcttcctgcagcccgtctcgttcgtgactcatgcggatgagatcctgggccagtgactgacgctgagactcaatcgcactcacacgctgccccaacgtagttacagtctgctcggaagcgtcaaagtcagcctggagatccttgagttccaaacgcacttgggtaacctcgtcccggtaagcgtcacgctctcgatacactcgagccaagtccgcgacggccgtctcttgaaggtcctgcagatgagtgagttcgggagtgtcacgctcttggacagcgcgatccagatccgcaagggttgccatgtgaacggctctgaggcggttcagctcgtcgcgagcttcgttgtgcatacgctggtgagctcgcagatcttcttgagccttcgtgaagctgcgcgtaacttcagccagagacacacgatcgcgatcccgatcccgagtcaaagcctcgatctgctgaggatcaatttggggaacgtgacttctggacccgagctcttcctcgactcgccgaagtgcctcttgcgcccgatccatgttatgctccgccacatcccgttcgtcgttagcgtcctccaagtcgcgttccagactagcgtttctactttggagctgctggatctcagcaccggctaacgagacttcggaggccaggtaatcgttgttttcctgcagacggtcgcgttcgcgttcaagccgttcaatgtgacgctgaagatcacggatctcgcccacctgctgggcgacccgaccttggagctgaagagcccgcactgcaccagccacggaggtagtcccctggctgcggtggacggcgtcttctgcttgtaggctgctcagctccgcgttctgccgctgtatgtgtgcctgggccgcatccagctctcgcgtctggtgcagcagcagcgctgctacctcttcttggttacgcatcgcggtatcacgggcggcgaccagagcacggagttcctcactgtgaggctcgagaggatctggaccgggtggatccggcgcgggctggttcacgtgatgactgctccgcgccgaagaagcggggggtggactgcgcccgtgatcggacatttctgcgacgctgggaaaaaggaacaagcaagccaacgtgcccgtagtgatgccgttgttcggcaacaactacggccaggaggcggttgtggagaagtgtgggtcccagaaaatgagtgacggcaggtgattagacgtttgatggatcaggatctcgccacagatgcggaagagtgaccgactcagatggaatcagagtcagatgggtctggatctacacccaatgaagatccaagatccaatctcccagatccaatctcccagatccaagatcccagatccaagatccagcgtggatctgggtctacatccgggcgcaaccaggaagttgtggacacgactcgacgggcaagcagctgacacgcaatgaaggtaaagagaacccatagagtcgataggcacagatcgggtgataggagctacatggtgataggactttgggataggagcgaacttaagcataaatcagaccagaatttgccttgtacaacgcaagcgcttcctccctcgcctggaaacgggaacgccattggtcctacacggcgtagagaggttagcggtagcagatctagtgttgattgcaagactggagtaatatattggccagatccaagaccttcctagtgaactacctgcaagtgcagatccaagatccgccggagttatctgtttggccggtgcgtccctctcgtctcaactgtcaacgacaccgtcattggaggcggcaaacacgaccaaggaagacctgcaaaggcaaaggaaaggaacaacaacaacccaaacgcaacaacccggccggatccagatccaggccgccagatccaggtacaagaccactggatttggaatactaccgcgagcagagtgaagatttccgcgctgctccacccacatccccgcgtctcgcccagacggttctgtcttcaaggctcggacgcttcaacagacgccagaggagcagatccagccctaccgacaggtacacaaggtgaccagttcatcacacagatcacggatcatcgggggccacccctccgtaagtcagtgttcgggcgcagttggtaagttggattggcaatctcgcagattttgctgatcccgttacaccacaagtacgacacgtgcacggattacgagtcccacgcgcccggagatgacgactgcggcacgaacacggaccccgagcccaacgcggacgaaacagacgacgacagcggcaccaggtgacgctgcaccagcgacgaagagtgcacgaacgcgaacgaaggcacccacgacggtaccagcagcatcgaaggtctgcgacgaagacgaagctcacgacgaagggctccggcagcgcggagacgacgaacgagacgtcggtgacgaagacgaacaccccagcgaccaaggacgtgacgaacagcacggtgccgttgacgaacggcacgatgacgacggcgaacggcgcggacatcatgggcgatgacgaagggagtgaccctgttgacgattatatgctccagttgagcgatgacgaacgggtgacggcgcagcagcgcagtaagtttgtaaagcggctggaagcggatggcaagtacggcagcatgacggtgacgcacgaatacggcctggtgacggtcaatacgccgaacggtgctgccaccgaccctttgggcggctgtcttcaaggagatgcacggcagcgtgtggagcggacaccctgcgcggtcctcacacgtatggccgcgtagcccagctgtactggtggccgggattgtaccgagaagtgaggcgatgggtgcgtggatgccctgagtgcgggtcccggaaggcaaaaccacgtgaagtgataccgccgctacgaggtttacgcggtggtgcagtgggggatcgttgggcgctcgatgtcgccggacccttcccagtagccgacggaggtgacaggtatgtcatcgccgccgtcgaatacgtgacacggtatgcagtggcgagctgcgtgacggaacatacggctgagacggtggcgacgttcattatgcaggaggttgtgttgcgcttcggcgtgtttcgcgagctactaacggatggagctccggaattggcaggcaaagtgatcgaggagctcgtgcagttgctccaggcgagacaaatcaatccggtgccctatcggcccaagatggtcggacttattgagcgcttccaccgctcgtggaaagattgcgtggcaacgttcatgcaggacgagaggcagacagattggaatctatgggtcaagtttgctgtctattcctacaactcggctagacactctacggtggcgttaagccccaatgaacggatgatgggaaggcggctacgcgcacccaacgaattactacgacggacggaggtgacggaggcgggagagctgccagtctatgagtgcgcgagcgtgctcgacagcgtgatcaggaacggcaggcgcggtattacaaccgcaaggtgaaaagcaagcggcagtttcaggccggcgacgtggtttggatgtacaacccgccgcgtggcaagaacgccaccaagtttgtacaccaatagatgggcctttgcgtattttggaaccggctggctacgataacttcgtgctaacgagggaagacaagaaccgaaagactgagacgttgatcgctcacgtctccttcttgattagttagcactacccggaggccctactcgcgcaagtggcgcgcgacatcgacgaacagctcgctgatgaagaccagcggtcgacgcggcatgagcaggcgccagcagcggctgtacggacagcggcggcagctactagtcgaacgacgagagctggaagtacgaaacgagcgagaactgtaatgggagactccacggaacgcggagcctcgtgtggcttacgagcggcactcaagttgtacacgtaaagtagcgtgtattgtagttagtcggtggcttttacattgtactagtttatctaaataaaataggtgtgctgccagttgggcatgtaccggcgcagtgtcttacgcttggacactgacggccagacggacttcggactgcatcagcacagttgcgaccaaaccccaagcgtgtggggctcacaacacgttgcagaataatgggggtgggtatataagcggtaaaaatattatcacgcctaatttcaagttgccgactacgtggtttttcataatccctttgatcgtctacgagaatcgcgtgagaatcttcggtttaacgtatcgtcgcagcatttccacggtgggtgtattggatcaaaagggcgcttacaattgaagctcacacgttcgtagcaaaaagtaatgtgagcacttcctcattcgagtcgcccgcgtgaaacaagtgtctcattcgggatgccggacagccctggacactggatgagggatatattgctatcgttttcgaatccgtaagcacggaagtaggaccgatagcagccaatagggcgatagcacctaaaactgcttctaaactaggtcacattggaagcacaagctaaaactcacttcacggacggatgggttggtggtggtgtggtgcgattgtgaacggaggccacgcaaactctagatgaaggcgaaagtaaagtttggattttaggtgcagaccgaaaaactgtaccgtaggtacaagacttctccgaaatatttttttcctcttgtcgccaaaccatgctgtcaaatggtcggagatcactgcttttctggtttgacctccagaacaccaccgcctgaatgtttcgacagggtaccttcatttcttcagcaatggtacatcgcttgcaaggtccgctgaccatgctgacctcatcctccaagttgcaggctaaaactgtgctgtgctgctcagcctgctgcgggcgacgagaatgctactcctggtaggaaagctctgcggcctgcttcacgtcgtcggtgctgctgcatccaaatgcgttgcttcaagaagctccatgctgcccagcgcgacgtcccgatcgtagtgtcgatggggacgcgcatctagagtcgaaatccacatcacgaggaattgtgctggcgcattttataatcgcaatatcgcttgtcgctggtcacattaaacgcgcctcaagctgacaaaatactttttgctgcgcaggaagagtccactgcatgatcgaagcattccatgctgtaagtcaggcgaccaaacgtcattgattactttgcaggaaatgtcaacgggccatcacattggagtcaagtggaagtacaatatgcatgagcctttacagcaccaactcaaccacaagatcatcaccaccaccactcgacgctttcaatttttggaccgaaggaattccatctgctgcttgtttttcttcttcttcttctgtggtcgttgtgtcgctacaacgcacccgcttgaatcgtgtttcctgtagctgtgccgccacaacttgtcgctcttgttctcgttgtttctgctcattggcgagtctcgcctgcttgcccagctcctcttgaataagccgttgaatgccggcattgcgctcagcaaccttttccggcggcagttcttgtggcttgcgatgctgctgcgcttgccacctgagttgctgcaccctcagctcctgccgccgcttccgctcttgctccttcagcagccgaatttcattgcgctctcgctccttcagcagccaaattagattgcgttcttgctccttcagcagttgtttccttgtcttttcttgctcctcccgcttgatctcttgctgggtcatcttctgtcacctcttcaatagtctctgctccctcaattcttgctgctgcttgcgcttcaaggcccgcagtcgctgcttcttctccttctctctttgctctcgcttctccactaatactctcgcctttattcctcgctctagacgtagttgtctctcccgttcctcctgttcagccagtgctcggcgctgctcctgccgcgacgacctcctcgtgggctccaacttgagtgtggctttggccggcgccgtcggttgaggacgaggtgacgggcgaggcatggcaggcaagttcaaggtctgcaacatgcgctggttctgtcggttgttgcgcattgccacgggcacagtaggaaggttggaacgctggatggcggggcctaaggctccgggatcttggttgctggagcttggagaggagaaggagattcagaagtggatggttctcttctcagtgccaagcccagcgaccacattgatcctacatgcattgtataaatacactggctacttcagcttcttattctactaggatcattgcagcggacacgatcataagacacagaggtcctccgacactcccccttgctcgcgttacgctgattctgcgagcaatactgtggctctgcaaattcgtcacaagctacgaacatcgtagcagcagtgagcacgaacatcgcgctgcaagcatcggagcgcacgaacatcggcgccaggacagtatcaaccacgtaacatcgcggtgagctaatgcctgctcttgcacgttgcagccgcttttggtgaaccatcacctgcctcacgactcaaacgaatccgcatccaggcaacaaaggcagtatccgactgcttgatttcagctgcagctcccccttgctcgttgcggcgaacgacgccaagcagagagcggaagcattcaaacttgacacgtgcgagcggcttcgtcaatatatcggcagtcatttggtcggttctgcagtgctgcacttcaagtagctctcgatcctcgagatttcgcacgtagtgaaaacgattctctatgtgtttgctgtcgttgtgctttcctggcttcttggacagcgcaatcgcagccgtgttgtcgcaccagagcttcggggtgtcataccgccacctcagctcgtcacacagaccacgaagccacatgatatcgcgcgcgccttcattcatggcgatgtactcggactccatcgtgctctgggcattgagccttgcttccgtgacccgtaggagactacactgccattcaccatcgtgacatacccactcacggactggcggtcttccttatcgttggcatagtcagcatcgctataagcttccacgcgcaacaaatccacatgggttgaaccagtcaccaccatactgagaccaaaatgcttggtggcttgcagatacctgagtacccgtttagcttgcgcgtagtggacagcaccgaagcacgccatatactgtccaagccgacgaacaacgtgtggaatatcgggccttgaccccgacacgagatactggaaggctccgacaatctcgcgatacggcagatcactcggctcaggcgccgctgggccttcactagcagtttccatcgtggttgcctcgggcgtcgcagcaccatgacagtcgtgcatatggaatcgtcgcaggatttcttcaacgtagtttgtctgactgaagaagacagtgttcttctcacgatcaatgctgacttccaccccaagcaggtacttgacgggaccgagctccacgagctcaaatgttgcagccagcttccgagcaatagcttcacaccgactgctctcgcccattagcagcaggtcatccacatagacagttaggagcatgacaatctcccccttctcgaggagggagtaaaggccatgatcactctccagacgcgtgaacccgagtgcaactaggtgtcggtgcagcgtcttgttccagacgtggggagcctgtttgagtccatacagggacttaatcagcttacaaatctccctatttccaggcgatccattgccttgaggcagttccatgaagacttcttcagtgagcttgccgtgcaagaaggctgttttgacgtcgtactggaaaatcgaccaccggcgctggacagcgaaataaatcgcgacgcgaatcgtgtcgaacctaatgactggtgcaaacgtctcgttgtagttttcgccgaacttctgcttgaacccatgtatgacgagctgagccttaaagcgcttgacgaagccgttctcgtccttcttgattccaaagacccacttgttcgtgatcacagcagattttccagcagcacttctatctacaacctgccacacaccatgcttgcgcagcgactcgggttcttcagcaatagcggccaaccagtacgcagcaaacttcgaccgaattgcctgcttatacgtcgctggcacaggtacatctcttgagtctcgagttcctcttacgctttctgccaaaacgcgagactcggtgtcgcgccacagtatcgctgtcagcaagaccatcaacaggagcagtctgcacgtctacgcctccacgagcactaggtgcttcctccacagtagacacaggaccaacaggctggggagcagcaatagcagcagggggctgctccacagcgacagactggccaggctgcacgagaacactctctcgctcagaatccaatcgaacaacgtcctcaatctgcatctgcattgggaccagcggcgctctcggcgggagctcatggtcaccgtgattgaaggcgttggctagcagtttctccacgtattcacgagccaccgtaaagtcttcagcgaaaatcaaattgcctccgcgatgagtggagactgcaccacgcgcaaggtctaaaaccttatagccatgagtggttggggaataacccaccaaaatcgcagtgcccactctggacgagagctttttcttcttggaccgtgctccactagcgatgtgatagtagcagagactcccccacgttcttaggcacgacacgtcaggcgaatcaccagacaatttttcgtggggtgttagaccatcgagcactcgggtcgccgtgatattcaacgtgtagacgacgtgaagagcagcttcaccccacagcagatcgggtaggttggtcatatggaggagtgcacggaccttgggcagcacgatcccattggcgcgctcgacgaaaccgttctcttggggggtgtacgcgttggttgtcgtcagctcgataccctcttcagcacagaagtcgagaatgtcgttgttgtcaacttcgccaccctgatccgagtggatttcttccacacgccaattccgttcgcgatatttgacgtgcaggtgattaacaagtgccgcaatgtggttcttcgcttcactcttctgccttagcaggaagagccatttgtatcggctgaactcatcgaccacaagtaagaaggaggtacacccatcgagtgtgggctcgttcacactgcagacgtccacttgaaggcgttgaagctgtcgttgtgcgtgctgtcgtcgctcaggatatgtcatccgcacctttttcccgtgcatacagggaagacacgttggcgcagcctccgctccgcttgtgctgatctgtagccctcttaccaccttctgcttgcccatgtcgacgatagtcgtggcactcgcgtgtgcaaaacgcttgtgccacaccgccaacggcaccgacttcttcggggtcacaatagcgctgtatacaacggcttgctctcgcacttggtctctcaccgaccaaatgcgatacaaccgattgactttgacgaacttgagcgttgttcctttcttggtcaggaagcagaccgattgatcggcggacatcttgacgaagtagttgagctccgtctgcatgtagtcctgcgagagtaagttcgcaggggcatcgggcacatagtacacatcggagagaatgcgcgtctcctgcctgccagtgacttcgttcacgatcctgagctctacactgccgacttgattaatgcttaccgtgccgccattggcacacagcatttcggggccgttacttatagttgatatctgcacaaactgagagagatcgttgcagacattggcagtcgccgcaccactcaaccacgtcagaggcgcacttcgtggccgcaccgccgaaggttgccatcagcgccgtcggccccgtaacatcgtgccatctaccgctttgcccacctgcccgagccgacgaaccttgacctcctttgctcggaggacgattgcttgcatcttggcttgtcttctgccagcagtcgcgataccagtgaccaagtttaccgcacttggggcacggccggcgttgcatggcggccttcacagagtggcgtcggctctgatgcgctcggttctgattctgccgatgaccccctccatggcgatcgaaattcttgctgctgtggctgtgcccagaagaaaactggtatactggatttgagtcagactgaaccagaatcactcgaagcgttgcgaaccacgatgcctccggccggagcacgcatattctctccctgctctcgcgtcaaaagccgcccacgtactttaccaacctcgagctccctggccttcattctcgcacccactagctccgtgctgaggtcggggaatacctcaagcgcattggtaaggagtagtcgagcaagttcagcgtcatcaagcggatggccaagcgtcacgagatcctcttgtagctgcatgatcgcgtcgatgtaggtgtctacgcgctcccccttggccagcttgcgcacaaacattgcggccttgatcaggatgtcgttctttgcggcgctgcccgcattgtactctttctcgatctcctggaatagagccacagggtcgcagctcaccaacagtcgcctgtaacgaccagccaatcgggggccaagcgacccagcgataacagcttgggctttgagccaacgctctttccagcgacgcttcttggcggagctccaagagctgtcgagcaccacttcctcggtcactacggaccacagcttttgaaccttgagttttaactcgatcattgtgcgccaaagctcgtagtcgtcggcgccagtcagcttggggacttccaggctggggctgtccaaccgagaggagcgactcctcttcttcttcttcgaggagcgcttcttcttgctggagcgctttcgcttagagcccttcccctcatccgaactcgtcggagttggacgagctcgcgtcggactcagagcagtccgagctagacgagctcgagctcgagctcgccccgtcgctccgcgacgttgccgagggcgcaggtgacgacggagatgagtcacttggacgatcttcgtcttcagaactgtcatcccgacgattcttggtaccattctgagcgtcctctccatgcgagtcctggagccgactagagaccctgtttgggctcataacctgtcggttgttgcgcattgccacgggcacagtaggaaggttggaacgctggatggcggggcctaaggctccgggatcttggttgctggagcttggagaggagaaggagattcagaagtggatggttctcttctcagtgccaagcccagcgaccacattgatcctacatgcattgtataaatacactggctacttcagcttcttattctactaggatcattgaagcggacacgatcataagacacagaggtcctccgacaggttctcctccatgcggcgctgtcgcttggcttcatactcgcacagcccgccaccagcttcgcccatcattgcgcttgtttccgactgaaatgaaggctacattgatggcacacacaacgtttacataattttggctgagaaattaatggagaaattcaagcactttgagcaaggaaaaaacattctcgtatttacgtaagttacatatgggattttccgccaaaacgtaggcggattggcttataatttccggaattggtgtattcccaccccttggagtacgacacattgactgaggtccactattggacattaggatcgcatccttccgggaaagcgtaagcgacgataagcggagaatcctattggtcaaaatatttctacctaagtgcacagagtcctgattcgcctccaggctccattgtagttaaacaactactttccggagacctcgagcacaaatccatgcctcctgctatgtgtccactaaaaccagcagaatttaaaatacagtgtcgcaggattaagagtttgcgtaagtatgttctacaacaagttgtctccgtttttcggtggcctccgtagactcctgggttgtgtccgcgccgctcgtccagccggatgtcgccgcgcagcccttgtcgtttgccgcgatcacctccttgcccgtcaccgtctccatcgtctcggccgaggcgacgccagcagacgtcggcttagagtgggtggtactcacggccaaacctatgcagtccctagctgccaaatgagtgagtgaaggggctccactacttggtggagtctcatcggcaggagtacacagcgaacggtgcgcgcgccactgaaacgaagcgcgctgcgcgatagtggtcaagcagcacgcgatcaacctacgttcgtgttaactcaaatcataacgccacccttttccggatgcgccaagcttcgtagtagtagtacggcttcagctttcatgtttttcttttcttttcttggagactgtactgtcacttagttactagttgcttactactcctgtctaccaacagcttacgacaaagctacctgggcccactcgtgctagaaacgctgtggctctccgattgcggagagtccgatgaaaatccaaagcgcgacctcagagaggacaggtgatcgacatcgccacccacgaggttcggcacgtacagggcacgggcccctcagcttccatgttgtttcggttgtcacggcccaaccacctattttatctgtaatgcgtatgctactaaatgcttcacctagatagtttgtctagtagatatacaccgcatttccgagcgacttaataagtgacccgcaagtgcagtgtacccgacgtgcccctcattcggactgccaagggccagtcatgtcattttaaccaatcagagcgatccattaaagcgtcggcggcagggacttacgttttctcaagtcaattcatttcttaattctcgagctctttctcgcagtatgtcagcatatttcggagctgcgcccagtacatagtgtcgatgtcgagtagctggaagtaaatctccagtgggtcggacttgtggccgaggtagccgaggcgtccgcaatagatataggggccctgcaacaatcaccatacaaatgaaagcaaacatattagccaaatgctcacgacgcttaatgcggcgtcataagcccttaccttggggaactggatgaagatcagcaagggttgtggcgttccaatcggaggcggcgggtcgtagtagttgtcgtcgaagcggagacgctcgtcgcccttctcgacctcgaagatacgatccatgatcgctggcgtgacgttttgggtgcggctccattgaaagaagacgctccgctcatcgtcgagccacgcttcctggagcaaatggtccagatagatcgcagcttccgcagggatgaacagcgccatggcgttactccacacgtgaatatcgacgccatcgtcgaatgcggcggtgtgcccactgggacacagcgcctgtatgactgaattcttgcctgctgggaggaactgcttgcccagcgagaacgcgtggaaggcgtccacatccacgtacagctcgcgagtgagcgccgccactttctccttgcttttcgccatggcgccagtaatgcggacgtacggcaggtgcttgactcggcgcacagggtacttgtccctgttgagctcttgcaacttcttgatcttctcctgcatctccgccttctccgctagcaccttggcgtccatctcctctcgttcccgcgacagtgcatcctcttccgccatcatgttgcgttcgaccctcctctggtctttaatctcgagcttctctaggcggcgctcgttcatcttcctctttttgatcctcttcctgacgctgagcgtctgtatggcctccctcctcttctcgatcgcctgcctgagcttctctttgatcttgtccttgtgtatcagctctcgtctcttggccttcgcgatcatcttctcctccttgatctccagtttgcgccgcagtctccagtcctttagcttcatccactctttgtggcgctcctccttctcgcgcttctccttctccttctcgagcctcagccgcgcggccttctcgcggtactgcagcttcttcttctgcctgatcgcttcggccctttgcagccgcttctcctcctccagcttccgcagcagcagcttctcgagccgcttctccctctccagacgcctcttctccttcttctcctcgatcttctcctgccgcttgagctccatcttggcctgcttcttctgctgcttcttctcctccttgcgctggtgccttctctgctgcttcgcctgcatcttctcctggagcttctccgcctgacgcttccgcttcgtctggcgctccgacttgcgcgtgggctccaggggcgtctcttcgcgcttgcgcttcttctccttcttctccttcttcttttgctcctcttcctccttcagcgccgtcttctgcggagaagtcgcggatccgagcgtcggcagccccagcgcctgcagtcggcgccggttctcctcgacgcggagcagacgcttggcctcgtactcgctcacgcccgcgtccgccttcatcttcctcttcttcttgaagggttgcgcacgagaaggttttggttggaggaaatgggctggaggctggtccacgctaagtgcgaatagagacatactggaatcaagtcaacgcgacgcgccaaaagcgagaactgttggcgccaaaaaaaaataaagatgggaatgttgtactgtactgtatgagcgtcattcgactctataggatgaggcagcaccctcccttcggctgctgtacggggcgcccagcacttttctctgactgatgctgggctctccatccatgtcaagctgcagcaacttgtcgcctccctcgcgaacagtctcagcgcggacgtcatcgttacgagcaaaattcttgatagcatcagcagcgtagcgctgctgctgttcggtgccagtttgcagaagctcaacaagttgcttgatggtgccttctcgaatcccaccacacactttgtcggtgcactccacacgcccaagggcgcccgccgcgctctcttgctgctctgcagtcccggcacacaaaagatcgacaagtgacgaaatttctccctcgtccgcgatgtgggcgggaacttcaggtatggacgcgaggtttctcaatgccctggcagctttcttcgtttgcccttcggtttcggatttcatgagcgtgatgaggggtttaacgacgccaatctcaacgcaactaccttccctcggtataccgtggtcttcgataatgctgactgcagactctttttgtcggtccgtcccattttgaagaagtgcaaccagcagtatgctgtcgcgcacaatcatcaaagcgttgacctcgtcgttcaagttgaggttttccagggctctcgctgcgttcgtcttttgctgctctgtcccagactgtagcagtgtgatcagtggctcaatacagcttgcaacctcggagcggtccgtatcgtctgggggtgaaatcatcccaagtgcctccaaagcattttctttatgcttgccagacccgtattttaacaagtcgattagatagagaacacctccttcgcgcgcaatgtctgcgcagccttcaacagtccgagcaaccccccccgcagagtatttgcagctttcgtccaaagtgggtgagtagtatttcgataaagggtgacgagtggcccaacaccaccatgacgtgaaaactcggcgcgaacggtcgaattcaacacaagtctgtcaatcgcagtcatcgcgctcttcttctggagttctgtgccctctcgaagaagctcgataagctgtgcaataccatcttcgcttacaatctgaagtcggatactgtcgaaccaggccagcttgtcaagtacaaccaatgtgtttagcttttgctggtcggttccatcgcgcaatagctcgatgaggagagcgatcccaccttcatcaactatctgcgtacagattgtagcattataggcaagaagtccgagtgcacctgaaacgtattccttctggtggtcagttccggttttcatcagctcaatgagcaatgggactactccttctcccgcgatctctgcccggttcccatcgttgttaagtgatagtgcctgtagttcccccacaacttgttgtttttgtgtatctgactcgtggaggatcaatcagcgggcagtgcggcgatagagccagctggcccagcggtccggccaatcagagcgcgccggtgagcatcgagagcgctctgattggccacgactggacgacggcgactcccttgtggagccagtcgttcctggcgaccggagctccagcgaaaggcatgcacctggccggcgtgcttgcacgccacggctgggcagctcgggggtgaagccgcggaccaagctggatttctgcgtcgctgcgtgcggcggcgtattgcggcggtcttttgaccgtcagccggaaggcggggcctgtggggggtccatggtggtctacacgtagcccatcgcgccgtgtcccattacaaaccaggccacgggtgacgccgtgggccctcctggtagtcatagcctacaaaggttgcgtgcgatactggcaggtcaccagatcgtcgggtgtgcggcactccaacgtgcgcacaccctccacagcactcgtagtgacgcgcgggagcatgctgtcagtcaacatggcctgcgctacatggagctggctgcgacggggtggtcctctcatggtgcactcatggcgcggcagggcgaagaaaatcgcagtggcagaaacccagatacggctgactcggggaaggtgacgacacgtcgccgcataaagcgctgctggggcgctcgctggtggcctgcaacacattgggaagaaggaacgcaagtcggcccaggaaaatgcagtggagaactcaagcttcggagggcaggcactgctgacggagcagcgggaccgcgttcgctgtccgcggtaccaaatcgacggaagtcgagtagaccgtttcaactattcggcggggcatcgggagatatgagctcggtgttgacggtggatgcgtccgtcgttatcttagttaggataaatgaactcaatctaacctcaaccttgaaatgagtgaaaacttgtgtatctgtcccatctcgaagaaactggacaagtacttagtacagcaacttcacctctctgcttgacctcagcgaagttgtctccactaacggcaatcttctgaagagcgctcactgcagcctccttctggatatcatccccaccttgcacaattgtaacaagggcctcgatgcctccacagcatgcgatatccgtgcacgcttcatcattacctgcaagatttagaagcgcaccatttgcaagccgcttttgttcgccccttccgctctgcactagacgaaggatcaactcaacgcctcccttctgcacgatctgggcacaagtggtatcgttgtcataggctagatctcgcagcgctgccgtagcgtaaaccttttgtgggtcagttacgtcttgaagaagctctagcagtggagcaatccccccttcgcgtagaatttcgccgcagacgtcatctttccaagcgagtcgatgaatcgcacttgcagcattctctttttgcgtatccgtcccatctcgcagcaactcaatcagtggggcgacaccccccttgcgggcaatctcagcgcatatttcgtcgtctccggcagcgaggactgccaacgtgctagcggcgacctctttatacaaattcgagccgccccgaacaaactggatgaggggctcgatgcctccttcctgcacaattgatgctcggtccgcactattgtggtcagcaataatttttagcagaacaacatcccctgcatcgtacatggtgtcgttgtgcatataattgacaagcagagcgatggctccttcgttcacgataacagcgcaaatctccaagttactggccagaggtgtcagcgtcaaagcgcccgctctgacccgaagaaacccaacgagtaactcaaggcccccctcactgacaatttctgttcttgtgtcgtcactaaacgcaggttgcccaagtgctctgacggcataccacaacaggtcgtcatctccaagtctaagaatctcgataagagccttgatcgcaccgaggcgagctatctcggcgcacgcttcatcgttttcggtcaggcgataaattgctaacacagcgttctgcttttgcgcgcttgcccctgttcgcacgagatcgagaatcggctcaatcccctcttcttccatgattttggagcagttttccttgacctgggcaatcatagtgagagcctccaaagcgtttgtctgttgtgcttgagttccatttcggagaagtcctacgagggatgccacagctccttcgctcacaatactagtcaatacatgatcggtccaaaccagtttatggagtgcactagccgcattttccttttgcgcgccagttccttctcgcagaagctcaatcaacggcggtaagccaccctcgcgcgcgataagagagcgcacatcattatcagcatcgtcgtcgtcaacgtagtcgtagtggtcgtcgtcaacgttatgtgcagcaagtctttccagtgccccggcagcgttctccttttgctggtcgtttccatctcgcaacgtgttgaccaacaggccgacggccccatcacgtacactatgagtgcgtatttctttgttgtacgcaatactccttagcgcacacagtgcactgttcttatgctcgtcagctccgtcacgcaagagctcgacgaggtgtgggatgactccatctcgcgcaatttcttcacaaagctcgttcttgtaggcgcgattcccaagtgcacctgcagcaattcccttttggtagttgtttccctctttcagcagctcaatcgatggtgcaatagctcctccattcacaatggctttgctggtttccggatcacttgaaagatttttgagtgcagcggccgcgctctccttttgaacgtcactgtcgacttccagcagtgcaatcagtggctgaagacctccttcgcgtacgaaagacgggcggatttcgtagtgggacgagagccaatttacgaggagaagtccctgttcttcaacgaacgctgtagagtgagcgtcgctggaggagacaagattccgtattgccactgcagagttttccttctgcgtgtccgtttcagaccgcaaaagctccacaagcgcttcaactcaattctgctgcgcaatctcgttggagacgtcccctttaaccgccgcactacccagtgcacttgcatcgttctccttttgttcatcatccccgtctcgtagaagctccactagcaacgcaacgccacctttaacagcgatcagagcgcacacctcagcggtatacgcgaggtttccaatcgcttctgcagccatttccacctgcgtctcagttccgtttccgtgtagcgcgactatcagcgggatagccccttcgctcgcaatgtcaactcgcacgtcgtaatagcatgcaattcgtgtgagtgggctcaatgcgctttctttttgcgagtcactatcaaccttcaaaaggttaacaagtagcgagattccaccttcccgggcaatttcggtggctgcatcgctgtcagagacatatgagctgatggcaccactcgcaagctctttttgctgatccgttccgtcttgcagtagctcagtcagtacagtgactcctccattctcagcaattttactgcagacgtcagcatcgaagctaaatgtttctgctggtcggtcccatctcgaagaagccccgcaagcgggggaattgctccttctcgcactacctcagcgcaattttcatcgccaacataagcgagtttcatcagagcactcgccgcgccctccttttgttggctggagcccacaataagtagagcgactagcggtgcgatcattttctctcgaacgacatctgcgcgatccgggtagcgtgatagtacaatggttttcagaacgaagatagcccccatattcgtgttgactgtttccagattgcgccagtgtaatgagaggaccaatgctcccttcttgcacgagtttgtcgcttgcgcccttgctgagagcgattcttcccagcgtacaggccgcttggtgcttctgttcgtcagtcccttcaagcagaagcgcagtcagcagcgtgattgcttccttttgtacaattttcgcacttccgtctttgctggacgcaaggctccccagcgcgtatgccgcgcggtgcttctgctcactagtgccgacttttaagagcgccacgagagttttaatcgcattcccacgtaaaatctccgctcggatcgtctcgttctccatggcgagatcgcccagcgcttcagctgtccacaacttctgcgtgtcattcccagtctgtagtagagtgatcagaggttgcaccattccggcacacagcttcgattcgctgctacttctcagcagggagctgaaagacgatctcgtcccagcctctcgcaacctgtcaacgttcgctcttgtggcgatacacgcacagcgcaccgctgcttcttccttttctcccgaagtgccattctgaaaggcgttgactaccgctgcgatctcactccgtgaagcctcttggacgcagtctcgaagcgcgtcaaagtcctcctgcgaaacctgtgcatccgagatcacggcccacttcaagcactggagcgcgtacaatttggcgaagtaggtcggcccatttctcaccatgctggtgacgatgtcgatgcgattgtcttcgtacatgggtgcgcgctgttcagtgttcacgcacttccgagcaagctggagtagaatcttctcctgcttgcggtcatccgcgtcgactaactcatccagcagatctgcaattgacgttgcactattcttcagtcgagactttgaagagctcgcagatccggacagctttacgtagctgtagggctgttcggaagctatcgaagcacctccgagcccatagttattcgcttcgtcatcggctagcgccttcaatagggccaggacttgtgcgaggctaactcgcttcgttggatccgtattcgtcatggacacgatgagatcccaggcttcatccggcatgtcttcaggtctttcggggattttgccgtgtttcaggagctcgcggacgctgtcgtcatctaatgaagcaaagggaggattcccgatcaccgcctcgatcatgcacatggcaaacgagtgcacgtcggaggcgaatgtcggcggctttttcaaacactcgggagctctccaacgcaacgcaccagcgtgaatcgctgcgcctgctgccgtcttggagttgagtgttgcggacagcactcaacccgaagtccgacagcttggccaatccatcagcccccacgaggatgttgttgagcttgagatccccgtgcaccactttcattttatgaatgtagttcttagctcaatcagtgccttctctctcagattccactgcttccatcctcccgatgagtatcgcgctactcgatttgttcgtgccttgctcaggcgtggtgcttgacgccctcagcacgctctggggctattgcgacgagatgaacgagggcaaagaagtctgcaagcggcttcatcgtcggctgaaaggaatcttcgaagagctccagaaaatggagaagtaaggccagctcccgcttaacaatgcgctggacgagtacgttggcgcgatctccaagtcgctgggctgtctggatcggtatcggaaaatgacgctggtgttcaggctcatcaaccaccaagagatgctcggagagctctgccagattaacgaagagatcgatgatggggacagtcgtccgagcgacttcgacgacggtgccgtggttcatgtcatcggacgagctcaagttcgagaaagaagccttcgcccgtagctccttcgcgtcggtgtaccgcggcgtgtggggcactggcacgagggtcgtggtcaagcgcttcctcaacgacgacctcgtggctgacgaacgcgccaagcagcagattgagaaggagatcaacctctggcacaaattcaacaaccccaacgtgatccgaatgtttggagcctcgtacgtgagctcccctgcgttagttgtgtgtgtgtgtgaagacgcgacgaacggcgacctctgttcgtatttggctcgctcggacagcaacaagcagcacatgtggcggttgttgcaccaggcggcacttggtttggttgagctgggctgagctacgtttgggcgctagggaaaaagaggaatgagttggggggggggggttgttgcatttccgttactagcgtacacagtgtcagctactatttctgctcgacggagaatggacacactcgaaattcgacgttaaacctacctgttgcgattttcagctgtggtgccaacaagagtacttaagtattttttattaactccaaagcttctcattgtcacctattccaacgagtgaagtgacgatacttaagtacttattttactgggataggaagcaacgttagtgctgctatcgcagaccaaataggatcatatccgtggtacgtcaagtcaaaaggtgacccctcttgacacctaactggtacattgtcctgaaaccggtgtgaccccggtgccgcactgggccctccaaaaggtagaacacccattacaccggtacggccgcggtgccgcactgggccctccaaaggtttatatgcgtgggcagattgaaccggtatgagtcagtaacatatatcgaatagtaggagtgaagtaaagtgaatgattgaagcggacgaactgctgcagaagcatacaaaggtaaacattttcattttctacaagctacaaacagatctcgagcaaggttcgttttatcactgtgtataagcactatctacagttttgaggtgaattacggggcagacgctgtggctgcgaagcaggcgcaggagatgcccgtggtttgtaaaacaaactcataataatagaaagcaattataccaaaaacctcctatcccagccttcgcggagccctagttcgttagtacgtataatactacttcgaagtactgcatagtagtacctggtacagtgcttacagtaattaatctgacctttaaatttgcgtaaaaagtgcaatttgaaaatgataggttttcgtcaaatagcgtgtaacatagataccttaaccctccaatcaggtcagactaattactgtaggtactgtagtaaggaaacgtacagttctttttgaccgtcatatcacgagctgtggctgccggtatcatctaaagcccgcactgagttgttgttaggagcgacgcaacttgattttaaacttgatgacgtgtatttaggcactttactccaatgcgtgctgaataggcagcacgttgtcgtgcagcgctcctacctaatggatataactgttcttgacgttgttgtagatgtagaagccggtcccgccgattccaagcagggtcaggaacaagatgctatacacgatggccatgcccttggtgtctccaacccactggatcccccggagtctctcgaccataatttttccgaattgctcggccttggccgagtccaccgcctgcgggttggcgcggatggcggtccggaggtccttgaacgacttggtcttcttgaggtctgccaccagcttctcgttcttgataatcttgtccatgcccttggccagcgcggggtttttccccagcatcgcagcgaccgacgggtacttttccaacacgttgccgctcttctccctcaccaacgacgaaaacttgcctgcagcccctttcaagtccactctctcctcagcctcggcgtcctgcgtggtgacgctggaccggaggcttcggtgcgtgtcatcaccttggacgcacactgcgagggtgatgaggagcagcgccacgaggaagaagttggaacgcattgcttttgggggacttggggcttccagcagtagagacggtcggtcgctcagttttaagtccttgccggtcgattctgaaatgagccattcccacctgttcatacgcgtcccagaaccaacaaaagagatggggagttgccgccgcggtggcttcgcttcatctttttttcttcagtttgttcgttgctgcatggaatggagtcgcaaatcgaagtctctgcgttttgtatgaccgacgttcattgcataatttttcaaatcggggaaatcgctcctcgctgttcgtagccgggggccgggattagctttcgcacagaatgaatcggacgagcgccggagactccgtgcagagacccgagaagcgcagcagatgagcagacgatttcgacaacttcaacccaatataacgcttgcaatgcctcacgagtggcccgactcgaccccatgcaatcacccgcggagtacatgtacttgaagctgccacatgaaccagcgactggccaacgccaccatgcagcatgacctcgacaaagatactgccatcgttcaattcaagcagatggccgcgaggcacgggagttaacagcgcgaagcccccggtgcatggcgctggatgtcgaggaagcttctgatgcatgcccgcgactacagagaggaagcaacgctccacggcgttgcgatgatacttggatctgcagattggtactgtactgtatcgagctgcatgaaacgcgaacgacactcgctcaccaggtatgacaatagccggctcaggcctgcagcattcagtattactagactacataacgcagcattacaaaagctacttgtcaccactgtagctggacatttactcaggaaatctgcgggcatgggggtggttggttacacgcgcttgttcaaagacctgtgcccatcagtcgccaaaacaagaagaaacgacggcgagtgaggctcttgccgtaaaaatatcggaaagcgcttccgaagtaaaacgagtcgagttgagtcgacgcattgcgcgtttgtcaagcctcagagcaagcgcacgcgtaagatcctccatgacggggctctctgatgcggagtcccctcaactggcggacattgtcgactccaacgtggaactcaatggggggccgaacactgccacgacccggtcagctacgatgtcgccctcgttggaggagaaggagcacacgccagttgttctcctccacaggagcattctccggggttctcgacgaaactcaagtcaaatgccctcaggggtcgtacatccagtcgcgaaaggggcggaggaagtcgcaaaccgagccaggaagaggagcgtgtcgtctcgaggcatcgcaggaaccccctccagttccgtcgcggcgtggtcaaccgtgacttcagtcttgcgtcgctcggtgtcggacatgcaagcgcactcggacttgaccaaccgtcggaaggccagtgagtctccgtacgaagaaatgatggagcgcttccagatccgccagctgcaaaggaccccgccgactatggagattggactggaaggccttctgggaggagcgggggtagactttggaggcaccgcgtccagtgcacgcacaggccgcaccccaaggcaagagcaccatttgctcccgcgtctctcggctcgcaacgtcagtgaacacgcctcgacccccgacgcaaacaccaggaaggcgagcttcttgaatttaggcgatgtgaattcctcatttgaggtcggacgaccgccactcgaaagcggcacgagcagtttgcagctcacggagcagtataacctcgcctacgggacgccgttttaccagtctagcgcaaggaactacttactcgcttgtgtcgagcgacttctgcagaagctagcgaggcccatttctcctttctccaaaatttcccaagctcgctacgctgtcacgttgatgacgaccgtcgtttacatcgtgtggttcccgctggagctcgcatttcacgagaaataccacattgctactgccgatactgctatcggagtcttgctcgggctcaatgtcgtgttgacgctgcacacaggctacatgactgaaacggggaagattgtcgtctcacattggcagatattcgggcattacatgaagacacgcttcgttattgacgcgttgatttcggtgccgctcctggtgcacagcaacaccatgaataactcgatcccagggggcaaatgggtgttattcctgcttgacgtactcagtgtagagcgcctggcttatatgatgcggattgtgcgcgtgatctggctcattcgcgctaaccagtccggaggcagccacaatttctgggcctggctgctgtactctcgctactcgcacctcttccggatcgctgggattgtcgccattctcgtctgcatcgcgcactacatcgcttgcatctgggcgattttgctggaggaaaatgaaacgtttgaagaatcgttcgagtcgtggcgcgacgtttactctgggagtttttatgcggctctactgttgttgcaaggagagggggtccccaccaacagtgcaggtcagaatttattcgcttcgctgtcggtgatagtggggtccatcgtcttggcagtggtgttcggccacgtcgccatcctagtctccaatttcaacgctaatactacaagctaccagcgtaaaatggaggaagtgttcgccatgaccgccaaactccagctgccagcacccctacgagaacgcattcacgagtattacgagcacctgtggcacgagtacgagtgcctagacggcgagattgtccagttttccaaggagttgtcacacacgcttggccttgaagtcgtgctgttcaagtacatggaggtggtgatgcatgtaccgttctggaaagattgcacgccggatttccagaagcagctcatgctgaggcttgatgttcgtgtatacttgccgaacgactttattatgagggaaggagaggtagatgtcgagttttacatggtgaatcgcgggcactgcgagattggtcgcgataagaaccgattcgagagagtgaccacctcaacgatcacagcaggaggaccaagcaatggcggctttagtatcggccgtagtaacagcggcatgggtgttcgccgtcgtaatggccccaccaatggagatcaatccagtgatgggtctcggcagtcagcgtacgagctggatgcagcccagcggagatactatcgcacgggaggtcgaggaggtaaaggtcacgatgtcctcatctccagaggccaagctttcggtgatatggcactgctgatgaactaccagcgcgcagcaaatgtacgggccgtcactcacgtggagatgtgtgtgctttcccgagaagacttccaagtggtgctggctcgataccccgaggaccgccggcgcgttgtcgttgagatgctggcgtcctacatgcagagctacgaattggtcaagtcgcgctgcccgctgttagagctcgtacgcaaagtttacagtcccgaagctatcgctgaggcctgtgcgaagtccggtggccatccaccgttaataccgccggttctttcagctcgacaagctgcagagcgaatttacacggccatgaacgtggagacgaatgacgggacgctaaagtttggcgtgggtgtgaacatccgcgaccagttggttgatttacgtgacaagcttcagaagaaacgcggacgaaagcaacaagcgaaggccagcgctgctggacctcctagttatgatagtaggagccgccgaggttctgatgaccgaatacgcacggagtcaaccagtggcaagcgagtcgtggttgaacccgtccaaagcactgcagacgcctcggtagcccacgaatcagcacaatcgacgctgtcgccgtcgctactagaacgcttgaagcaggcggaggagcgagagatcgtcatcgtccaggcgttgcaagagctgaaggccagcttgaagatacttcaagctcgtcaagtaactccaattgtttcaccaagacgcaagcgctcggcgctgggcaatgacgcaactattccaaaacgagctacaggagttccgttggtgaaaagaatggggtcgttcgttggcctggcgtcgggaagtaccttggagagcaaaccgaccggaggacaagcgtccaagcgatcaccaacgcgatacgcggacgagctcttcagccaaggctcttctactgcatccgagcgatctagcttccacgagctccatcatccagtccgacgccagcgtcagccgagctccagacaagaagcctcgttcaccttctcctcggagattgagtcgcatctctcaacagtcgaaaactccccgtttgatcaacaaccagcgaaggcgcctacgccccaagcagctacgaagtacaaaatgtctgaccagcaacgggcgtcgaccaagtctctaaccagtgcaccgcccgaggagaaccaacagcaacgaatgcacttccagcgcttgccgagccaatcgatgaggaagttgcaaggagcttcacgagctcgagccgactctgcttcgtcaaccaaagcagtcgctggcgagcaagcgcgacgggggacgttccagcggacccacagccagtcgatgcgtgcactgacagaggcgttggcagctcacgctgcgccccgtggctcgttgtcgaacgcccaatcccgcgtcttgaagcgaatgagctcctttgtttcggatacgagcggatcatcgaacagcaagaggtcacccacgcgatatgccgatgcacttttccgaaggaagtcgatcgagctttcgaaagatgaggactgggagtccgacaaaccagcatgaggagcgagtgtcactagatttagccaacaagcaaccagtgcagtacgattttggagcgattcccgtagccatttcctatttggccgagggctctgcaagaacctaagagtaggaagttgatgttttgaccagcaagacgaacgcgatgaaggccacagcaaattttgcaccggtatcacgagaaagaaagaaaaaaattgaagctggcgatgagccgcctccatcactaacagtagggtatctttttcttgttattgctactacagctgataacgttagtgcgcaaaacggagctgctgaagagcaaggtacgaatgaacgatgtgcagtgtaaacgctgtaaagtgttgttggattgatggggtgccttataacgtcatgtcgtggaatcgcagatagcctggttggaggagttgggtctaagtcaggacaaaatcaatgtgatgattcaccctcttggagaactcgactgagcggtacgtgaagctcgcggactggtatctcgcacacggcgtacccaaagcaaaggtacgtgaatggagtagtgtagttttcattcgcagtggtagactgacagcatcacaacagttgcctttcctgtttagcgttggcccaaatctgattagcctcgccacggacaacctcgactcgaaactagctttcttccgagagagcgggttcatcgaggagcagatcacgcgtattctgacgacgagagcaccgcaaattctccactattcgagtgagtatgtgagctccaaactgaacttcacggtgcagcttggaatcccccgagaacgcctgatccagcttgttccgcgtgctcctgaaagccttggcttgacgacaacgagagttcaggaaactgtcgatgccttggatgaaatgttcggcgacggggccggcgtggcaagaactcctgcgtaccttcggtcggggttgttatgggccataacttatggctaatatcgagggactccgacgagctttcgactaccttgtatcagttgtggcttggcccctgagcgagtgtcggcaaaatgcctatggcggagcagagacaacattcttcgaccgcgtttcgagtttttacaaagccaaggtattggcatgggtgctacagttatttggatcatcctatcggagcgcatattcattgaaacatatcccgcctacaaagtgtatcttgccgagtacagggcacgtcaaaaggagagcacggcttccacgcgatagtgccgtagctataatggctgatacactgccattttttgcttcgtcgctacagtgctggactggaacgcgatcgttgggctctgctgtagttctcgctacgcccatcctgctgcaactaggaaatgaaatttagcgaatcgcgtaccgcagcgcctacaacgccaatcgacgcctcttgttcatcaaaacgtgcactacatcagtgaagccagccatcgtctctctctcttgagcttcactgatactcatttcatcacattggtcccgaagcaactcaacaacacccacacgtccttccatcgctgcaaccaggagtgcataatggatgttggttggatcacttctctttgacaaaacttcgaccacctcggtatgtcctcgcgtagcagcgcatgccaaggcacgagtgatgctgcaagaatccatctcgtttatcagcgcctcgattggtacaacaaacccacttgcggcagcattggcgaagatagcctcgcgaacgctgtgctccttgtgcttcagtagctgctttgacgcctcggaggttccatctacacccagtcgcggcagtgcgcatgtaatcgtatcttggtcgcagcaggcaagaacaactttaaaactctctagtcggtcgtttgctgtcgcttcaaccagagcgtccattttgagctcccgactacttgacttgaccaacacgccaaccaacccagggttatccgtgatcacggcatcgattagatggtggcccgcatcaaaatctgggcacttatcgagtatcagtttgaccatttcagtcttggacgccacttcaggcttggatagcgcccgcgcaatgtactcgtctacagtagacttagttgtctcgacaagcataagtcgagtatcagctccagaacatccattttcttgcacgccatcgctagtatcagcgcttcggccacacattcgtgcgaaattctgtcaaataggatcgtcatcacgttggtagagccatccttcaccgcagacacaaaggatagatcgatgccacactccactggatgtagcgagaaccacgaaaactgctccccttctgagagacccaacggcagcttgctagtattgatccgggaatccagcataagttgcagcatctcacagtaacaatgcttagcagcaacacgaatgagtttaccgaagtctgggttatttagatcccgaactttctccaacataaacttgaccatctccaccttattcccacgcaccgcgtagtttaaggcgcccgatacctcctccgcgctgacgcagcagccaacagctcgaacacctcagtgtgccccaactccgcagccttcagcaacgcgtggcgtgtggacggtgccctctctccatactttctcaccaagaaccgcacgactttcaactggttcgccgctgccgcagcgacgaacacaatagctctatcgtatggccagaactccagaatatccaggacatcgatatgtccattagcggccgcagccactatagcctgctcttgagcccttaagcccatggacggccgtagatactacacaactcgagcatggccgttccccgcagcagctttgagctcttgccgtgtatcgctcttgtccgggtagaactggtggagccactgtagaacgtgcaggtggttgttccctgctgcctcgacgaacgcgtcagtagagcagccttcgtccctggtgttgtgcagtgtctgcacgatgtctagccgccctctggctgcggcgccgtccatcgctgcgaaggtccaggggaggaacgcttcgtacacctggacgacgcgtggtagctcgttgtagagatcgccccgtcgatggttctcggggtgagcaggtcgctgatgaaccgcgtgattgtgggggatggcgtggatgtttgacggcagtcataacttgagcaggagcaggggaggcggcggcattgtcgcaactgtcatagggcaaaaagagtgtacctatgttagctaaaattatggcatgaaatcattttccaaaaaaaaatgcggtgagagcctggtcaaggcaacgggatacgccgcgctaaaatttgcctacaaagaattcgagaagatgcaacgaagtaagggcattctgccgactggattgacggcataaccgatcaaaagcagctccaattcaagtttcggatttttactcatccatcgcttcaggtagaatacgtgagcagtgaatagtttagcttttacttttcggttctttttcagtgatgcctcgccttcttgttttccagaatctgcacaacgtcgaagtagccagctgccttagctctcgctactgcttcgccgacgctcacttggtcacagtggtctcgcagcagctccaccacctccacacgaccttccattgctgctgccgaaagagcaaagttgacagccgacgcgtcacttttctccagcaaaacttttacaacctcgtaatggccacgtgcggcagcacaagtcaacgcacgggtgacgatgtacgcgtccattttgctcagcaagcgatcgacaaggacgacagaaccatcagccgcagcacctgcaaaaacactcacagtcgtgcaattgctgatcaccaactcagcgacatccgatatttcactagctgcaatctgcggcagcgcgcgttggttcgtgtcttgatcactgtgagcgaggagaacttcaacgatatctcgtcgcttctccttaagtggctggtgtcggataacacgtcctaaaacgattcctaaagagtcctaattgtcctaaaaaactctcgaaaattaccgtgagatgtcctaaaactcgtataatccttcgtaacagaatataataaattacgtcctacgagctgtcctaaaacctagttttatgaatattacgcgttttattggtgaccacattgtttgatacgcgtaatttagagcgttcgcaacgttatttacgcgtaattatgggctcatcctagccactcgtcgaatgttagaccccacagtgcagtgctgccagcaatttcactttttgcagcctaagtgtgagagcccaaccttcttctcatggaccacggcgggtattcattctgcgttaagcgcacatgcccggaaacaaacacgatctactacagctgcaagaagtttcgtgagggatgcaaggcaagactgattgtccgaggaggagccgtcgtcgccgagaagagtgtgcacaactgtaaggatgagcccaagccagaagtggtggacgtgcgcaaggagatgagagtggagctccagcgctctagcatcaccaagatgtcaaccccaccggcggtcctgtggcaagaggtgtacgacgatctcacgcttcgctacggcggagaaggtattgcgctcaagatcatccctgcgaagccggccgtctctatcatcaagcacacgcgcaaggattgctctggcggtgatgtctttgaagccattctgacccaagctgttcggtgcgtgagtgacatggatgcgagggcctttcttcagttcagcgtggtccaccccaccgccgcgggcaccggaatgcaacgtctaatcggactgacccatcccgacttggctcgaatgctacggtacccgaagatcacgctgttcattgacggaacatttgcggtggttcctaagccgttcagtcagtgtctgattgtgatggctttcgagccttctgtcgacctctacgtgcctgtttgctatgtactggtgcaagtcaagtcccaagaaacgtactggcgggttctcaacgagctcgtgatcctgagcaaccgccagctggagcccgaaaatgtcacgtgtgactttgagcccgcccttgtcaacgctgtgctggagcaatttccgactgcgaacctcgttgggtgcctgttccactggaaacaggccctccgtcggaaaatgcttgagctgcggctacccgaagaccaaatcaaggacgctctcagcccaggaaggctcgacactctcacggttatcccggaggaccaaatcgctgaaaaggtgcggactattttttggggtgaccaattttttgtgtctgacctattctgatgaatggctgcattgtagggtgtgaggtacgtgaggagtattgtcgacgagaccggttcgaaaacaaaatggaatactttttggaagtatttcctcaagacctggacgcagcgatttgatgtcacgacctggaacgttcatgaaatggtgcggtgcggtgttgacatcgttaaccgcaccaacaatccgctggaaaagtacaatcgtgacttcgcgtcgcgagtaccctagcctgcttaccttcattgaaggcaccaagcaagaagcagcccgctatctccagcgcattgacgacatcaagaagggactccagacggctccgcagcatgctccgccagtagtgccagggatcccagctggctatgcggactttaagtatgatagtacggtgttcagacgctgataatgcagtcctgcttcaacgagagcccttgctaacaagttgccaaaaaattccatttgtcctaattggacagctcccagttatagtcaacaaagtgtcctaataggacaactgccagttctaggcagttaagtgtcctagtaggacagctctcggttattactcgactaagtgtcctaataggacagatcctcatttaggtgaattgttgttgtcctattaggacagatttcggtaagtgaattgtggctgtcctattaggacagctcctaaccagcccgttcgtcctaaaacgagctgtgttgtcctaatttttggtaccgtttatgagcaaactgcaagtaatataccgcattttttaggacaataggacatcttaggacgtctattaggacgtgttatcttttaccaagtggctttgactaaagcatttactcggcactccaagctgctgttcttcacaaacacttgcaccatgtccacattgttttttccaatagctatcgtcagaccccggctcacaccagcgtctccgcatctatcaacgagaagcttgagcatatcgatagaaccgttcgacgccgcctcatgcagaatgtccacgatttcatacttcatactttctctgttcggacacaggtcgaataccatttccgtgacaaggagttggttattgcttactgccatggatagcatgcccccaatcgctgttggcaaccccaccctctcataaagcaatttcaccgcatccacggatccttttttcgccgcaacgataaaagcgaaatcgaacgcttctcgaagggggcaatacgtatgcctcagttcttgtccaccctctccaaggcccaacgcctgagagcttttctccagaccaggacaataatccagaagaagtgccagcatttcacagttatcggcagcactaggaatagcattcgccagcacacgcttgcctgggtggaatctctccagtatcaaccgcgccacttggatctgcccagaatgagctgctgtacaaaatacctcgccgacatcagtcttatctgccataccagctaaaaactcgacaatggctgtatgacccagctccgcagccttgtacagggtactgctatcgtagactgcgaagccccttctttcaaaaaggtactggagagcttgcagttgcccattattcaccgcggcgtcagcggcattttgaataaacaagacatccactgaccacggccacagtgcccgcagcacatcaacatagcccccagcagccgcagccgcaagtgcaacaccaatctcgtcctcgtcgacgtattcgcgtagcatctccaccgcttgcacgtgtccgttcgtagcagcagcagccagctctttcggtgggttgcagagctcgatgtagaagtcgtagagccagcgtagaacgttgacgtggttgttctccgcagctccgaggaaggctgcggacgaacaaccctcctgtctggtgtcgtgtagtttttgtaagatatcgagccgccctcgtgccgcagctccgtccatcgctctgaaggtcacggggagagacgactcgtagatcccgagcactcgctgaaggtcgttgtagatggcggcgtcgagggtggtcggtatgagaaggtcgctgatcagctgggtgacgtgtggcagcgcttggactcgcgtggggagagctaccgcgacgcaaagcagcacgggaggagaccgcattttcacggcatcgaccccccctttgttagtcaaaatattcggtaagttagtcgaaatatccttttggaaacagcgtttttctctgatttgagtgtgaaaatctacgtctaggcttggtaggagttgtgaagaccggtaggtacaagtcgtctactaagtacaccgccgaagcgtgttgcctaggtagagctgaggcccgattggaaggcgccgtcgtacgcttcgtccgtgctgaaaaagttgtgcaactcattggttggcaccgtgaggttgaacgctggcatttggccgacgcacgatttgtccaggcgctgcaggtcgccgttgttgctgatgtacgacaccaacagcttcatgccgcacgtcacgtcggggtcgttgctgtcgcccagtcgaggcgtagccacgatgtcgtgctcagcgtagtcgaaagtgacgagttctttcttgctggtgcgaagcgcttcgagcatgtattgcgcgtacttgtgcggcgtctgcgggtccaacttgccgttgagcagcagcacactaacgtcggctgggagagtcgcagacttgttccagtatccgtcacgctggtagaagatcccgttgccattgtagttgccgagtttgaacgcatcgcacgctgctgatttttccttcgagaacgcgcagtacaacgacgtttggccgtaggtgtctccaggggcgatactcgagttcaccaagcgtgcctccatctgggcttgcgaaggcgtcgggatctctcacatctccgagaacacgatgaggtaggacacaaggctcgagaagtacggatcgtccacattcgagtaagacgtgtacgagtggaggtaggcgaagaactgggtcaggacgtccacgtcgtccgtgctgcagcggttcagtctgtacacaactggcgggatgagcgtgcgaatgttcgcctctttcagcagattagccagcgcatttcggagcatgtatgatgggggaacggtcgtgaccccattagcaaccagcgaagcgcaagttgagttgcggtcgttgtcgatctttgtcattagaccgcggagcgcagacgacaggttcgccgactggaaatgcgtcttacagtcgccgtccaaaccgcacagccccatgaagtactcgcccacctccagtatcccacatcgagaagtactcgaatttgcccggtgaaacaccagtaggagccgcaacgccatccagaacgtagccctatacggtggctgggttgaggtgcatgaggcgctcgaccaaggctgtaccgtagctctcggcgtacacgaaagtgctcgctccgttcgaatagtcggaaatgaacgaggcaatatccgacgcagcgctggtaatcgagaacgaggacaggtctccgtacttcgagtgcaagtccttcgcgcaggaaggaacttcggtccctctgatgtcgcgaccccggggcgacccactcgtcatagcctgtgcggccacacagtcgaagagggtgctgcgtccagtgccccgatgatccaaggtgtaaacattgactttacccccgagtcgcgcgtgaaggtccttcatcttttgctccactgcatcaaaaacgacaattaaaacacgtgagaattctatactggaacaatacaagagcgagtgcaaacttactgccaacggatgaaaacccaggtcctccggatagaagccacgcgttggacgctttcgcgacgttaccaaccgaagcgggcaggcgcttcacgaagatgtcgactgtcggatccgccgtcgctggggccttgtagacgccagggtgacacaacggagcggagtagacagcgcattcggcagtttgctctcgtggtctccctgcggcgtctgaaaaggtgacctcagagcaaggataccacccattcagcggacgttttgcggcattcgctgcggcagccgtctgagctaagacgcagcatagcccaatcgtcacggtccggtagagcagcatgcttgctcaacaagctggtggttcaatacgggattattggttgctggaaagttgaggaatgaggtcttgaatcggacaagccgattcaacgccaggcgtgatggtgcaatccgtattactctctcgtggagtcatcagtccgcaggtctagctacattttaatctgttagcaacgaatgcaggcgtcttggcattgcatgcttcgtactgttgtcccccagcttaggatcctttcctattctcattgtaataccacatgtaatagtgtgacggttctcgcgatagaatcatgctgactacagtagatttcgtagtttgcaacaattcaacctagcaaaggcgccttccaaaagttaacaaagtcggaatgacgctccaggcagggctgcagtattattggtcgcctaaacaaagttcagtaaaactcaaacggttaagtagatacttccggacgttggacctcaaggcgcgcgaagactcacttcaatatgtagtgatcccaatcacttgctgattgcgtgaatggcaatcctacgttggttcacgcagtttaccatgatggcgagatttatctactgcttttcaggaacaaaaccgaacaactgcttctgcaaccactcgttgcgtgatcctacaaaaccagttcgtacacagcatccccccggtaatttgcctcaaagtgtatagcagtgtacaagatatgatgttgaatttggaagcggcggacgtacgattgatcgtgtgacaaatgctcatctttgctattgtacagtacatcattcaccagctttctttacttcatctgagactaatactgtagtgtacccggttcggtgtttgtcgctggttcgcacaggttagagatgtacgcatttgaacgttttgaatttatgatcggcgatcaccagctcctagaaaatgtacccccaaagtgacccacaactttggaaaattgttacttctgaagtagcacgatatctggtcccaatagaatatttcgactaccttacccaaatattccgactagcatgggaatcaactattcgagttgccagaaatgaaaatgcggtctccttctcccgtgttactctgcgtcgccgtagctctccccgcgcgagtccaagcgctgccacacgtcacccaggcaatcagcgatttcctcgtaccgaccactatcgacgctgccatctacaacgcccttcagcgagtgctgcgggtctacgaatcttctcgtcccgtgactttgggagcaatggacggagctgcgacttaaggccgtctagacatactacagaagctacacgacaccagagacgaaggctgttcatctgctggtttcatcggagcagcagggaataatcacgtcaacgttctacgatggctttacgacttctacgacgaacacggcgacccaccgaaggagctggctgctgctgctacgaatggacacgtgcaggcggtggagatgctacgcgaagatgtcgaggcggacgacacggtcctagctgtgcaagcagcggctgctgggggtcacgttgatgtgctgcgggctctttggccctggccaaggaatccttggagtaatgccatgaggaaggcaccttaccttgcggcggagaatgggcaactgcgagccctgcagtacctatttgagagaagagggcacgtgatgttcgatggtttcgccttgcgcagggctgcggagttgggccatattgcgattgtcgagtatttggctgatatgggaaagatgagtgacattggtgatgcattaagcgctgcggcaaaagctggtcgactcgatgttgtgaggttgatacaggagcgataccatcctgacaaaactgcactggcgcatgctatcgtgccagctaccaactgttcctgtgaaatgctggcattagtgcttgaattttgccctcttccggaggaagactccaagccatcgagtcttagcgagagtgatgcaagcagcggtactgccgcctccaagaagctatcgaccgcgcgtttgattttgccgtgagttcgggtaaaactgatgcggtaaaattgctatttgactgtgtggatatgtcggtggaaatgatgttttactacgcggtggagaacaatcagctcgctgtcacggaattgatgctcgaactatgtcagaccacgcaatcaaagcgagagggtctgaaacatgatatcgtggagcttctgcaacaagctgcgtcgaatagttctgtcgaggtgcttaagcttctccttgcccaatgtggagatgctgatgtgagttggggtctgaaggtagctgtggaaaagaacagtccgagtatggtggaggtatttgcgaagagcagcttggagtgccgagtgaatgctttggtcaaagcagctccagaaaaacaacgtgacatcgttggagctctcttaactcagattgcagcgtgtggtatgacggacttgacaaacttggtgcttggcagttgcgatgacaacaccatcgtgaatattttcgcagatgctgcggctgatggttctgttgtccttgccgagtacttgctgagcagaatggacatatacactattgcacgtggcttgacttctgctgcggcacgtggccatatcgaggtcgtgagagttttactggagaaaagtgacgcgtcgactgtcaactttgctctctcggcagcagcaatggaaggtcgtgtggaggtggtggagttgttgcgagaccagtatgatgatgtgagcatcggtgaagcactagcgagagctaaggtgaccggatacttcgacgtcgtacgaattctggaaaacaagaaggcgcgccttcacaaatcagcactggtagcgttattatgtggagtacgtgcagcctgagtcgactatttccttctgcatgccaatgaataatttaattaaagttcttgtctttccttttgctggttggaggccggcttgcacaggtttccacgtttgtcgtcgctagatttcgtgcccgggaagtcctacgagtcaaccagtccgaactggcaaaatacagggattggctggctgccgctgctggccgagtagaaacaaaataccgcggtacgccaacttatgcccaagagcgacgtaaaatccagagctgttccgggcagagcacggccttgtaaagtatgcggctttcacacagataaggcatccggtgcaccgtacttaaaaacatgaaagtgatattcacggtagcagcccataatttctcgtaatcgcaagacttaggcctcgacaaacaaccaaagaaaatcccgttctcgatcgtgtagataaggcattcggccgctgcaatatttctgttaatactctagatccagggcgcggaatatcttgttccagtccattgccgcaacgtccagcaactgccacctgaactctggcgggttcgaccctcgatggccaagatacccaagccgtccgcagtatatatgaacgccctgctcatcaaaagaacagagaacccaacacgttagagatccctcgcgaaacgtcatagagacacaggtccttcgaagtagagtatttaccgcggggtgttcgaggaaaaacagcagcggctccttcgtgctctcgttctcatcgccactagtgccatagtacgacttgtttaagcgcaggcactcgtcacccttctgaaccttgctcagccgctgaacaatcattgggaggctgtttttccgcagttgggcgagccactcgaagtagacgactcggcgtccgtccaccgtatcttcatggaacgcgtactcggaatcctcgtccgagtcgaacagcaccatggcatttttccagagacaaatcctgttggttctggcgaaattcactgcgttactcgggcacaaggcgtgcatgacgctgtgcctgccttcaggcagcacttgtctgccgagacacaagctgtggaaaggctcaaactggaggttcaggtcgttcgttctctcttgggaccctcgacgccagctctgcacttgacacggatacacgaacggcaggtcgagcgatggaggctgctcttcgagcagcttgtccagctcctgctctctctcctccttgagctttttgaactgggcccaggtataggtcggagcttcgagtttttgagtatgcctgttcttccacctcagctgtttgactattgttgcccaatgctgcagaaagtcgtgggcttccttagccactgcatcagccttcgactgctgggttcgtagagtcttgactcgtttggacactctggttggcttggtctgtttcgtcgcggtcttgttctgttttttggcttttggtgcgcttgcaggaggtgcagggcgctcgaaggtggcgatgttcagagacaccaacttgcgcttgttctcggcgatgcggagcagtcgcttggcctcatactcgctcaatacaggagcagacacattacccaagcgtgtcaaaatgtgacgaaaacctacaaattaaaggtataccggttttgaccggttttgaacgatacctgtcaaacatgcttgtccgtgtcaatttcgcaatgctgcggctgtggcgagctcctcgggtgccgctcgcgagggggtttgctgcgctccctgtaccagccgcagagggcggcgtggctgccaaaaggaagcagaagcagtactacgcgactatcctagagaagtacccgcgacaagttaaaggtgtcttctccgatgaggcgctgaaccgcacggtggccttcttggcagaccgagggatctccaggacgaaagcgatgcaggccgtcgcaaattttgttccggtatcacacagtaacaaaaaagttgaccatgctgcagcgaggctaacggggcgttcttcttaccgtcctgtagctggttacgtactcaacggagctgctggagagcaaggtgcgcaagaatgaatggtgtggagtgcagagatgcaaacgactgacgacgccattggactgacagataagctggctggaggagttgggtctgagtcacgacaagatcaacgtcgcgattttgcggaacccatccatgctgggacacacgactgagaggtacatgacgctggtaaactggttcctcgcacatggtgtgcccgaagcaaaagtacgtaaatatgcagttattttgtgctttttattgacaacggcggaagtctgacagcatgatataagttgcctttcctgtttatcattggtcccagcctgctgagcctcagcagcaacaccctggactcgaaattagatttcttccgggagattggactcaccgacgagcagctcacgggtattctgaagagggcgccgcaagttctttgctattcgactgaaagcatgaacagcaagctggactacatggtgcagcttggcatacctcgagaacgtctgccacaacttcttccgaatgctcctgacatccttggattgagaatgtcgagaattcaggagactttcgacgcgctggacgaaatgttcggtgacggggccggttctcaagcaatcgagcgccactttcgtctgctctcgtacaatgtggagggactccggcgagctttcgactaccttgtgtcggtcgtgggcctgaccccagaccggctgcagtcctgcacaagatacttaagccgcagcagagacgacatccttcgaccgcgatttgagttcttgaagggccaaggcgtagacccggctaccaggactacctggatcttgctatcggatcgtgtgttcggtgaaacttaccccggctacgaagcatacctggccgagtacaaggcgcatcaaaaatagaagacgggtttcgcacaataacgctgaaactggaatgaccgatgcactgccatgctggctccgtcattggccacagctgcagggctggactgaaagtcaaccaaacaaccagtacaagatcgatgggcaccacagactaaaaacgatcgcggtatttctgtgagttcaaaacattgttttttgttcgaatgtagttgtagtatttgaacgtttggctggtgatggaggtgcctcgttttgaccggcgaaaaacgctacactactatctgtacttttcaaattgcatggctgcatacttgtatgcttgttcgattcagcacgagttggaaccactgagaattaagggaggacacgatgggaggacagaagccctcaatcacgcagattaatccgttcaaaaacgacgttgccgaaataataatacatcaggctgattgagctgaaactttgtttgtttcgtgctgaatgcgcctaatgttttgccatcacgtcgtcgcacaaaatcagcgtcgatgatcttgttgtagaacgaaatggccgtctcattccacgcatccgacacatcccttcctgatggaccgttgtcctttgatgctactagttctggccacttaagtgtttagacggatcagaggttgccaacaggtcacgcactttttccctctgtaacaagtccacatccagcaattgccaccgaaactccaaaggtttggatgccggccgatggccgaggtaaccaagccgcccgcagtagatataagggccctgggcgtttccacatccaacaagtaagtattagccaaaacaatcgatccttagtctgtcactaaacttatatcacttgtagactgtacctgtgtgtgtcggaggaaaagtagtagcggttcttcccgtgtctccccttcaaccctgtcgtagtacgactcgtcgaacctcagactctcgtcgcctctcttcatcctcctcagcctcatcaccaacggcgactcgtcgtgccatcggttctgcccaaaccactggaagtgcacagcactgcgtccgtccgcctcctcctgttggaacacattgtcgtacggcgactcgctctccacgttcacgaacagcacgacggcgttgctccacggctgcacgccgctcatcttggagaacttggcgacaaacccgggcggacacatgccctgcatgaccgtctgcttacccacgggcagcaactgcgtgcccagccattccgagtggaactgctccagctgaatctggatctgggagctggacacgtgctggttcttgcccctgtgggggttatacagctccgctgggtgggtgacaggcaagtccagaggttctgggggctcgggcttgactcgttttggtcgtgggggcagcgagtccagcgcctgcagctcttcgggctcggcctcttccgctgttgtgtcattttcccgctgccgacgctgacgcagcgacctacgcacgggctgcagctgctgcgcttctcgcttcttgcgggcaacggggcgaggccgttgcgggatcttggggacgcccagcgcctgcagcttctgcaggttctcctgtacgcggcgctggcgcttggcctcatactcgctcagctccattgaggaccaaattgacatgtagccatttctagctggccgttactatttagaaatattttgtgtgtaaggtctaaccctagaaacgtcgcttttcagatagaaacttgtgcgatctgacaatgagcgacgccaagcccaagccgccgcccaaggcgcgccgcgcgctgctgcgtctccgcggctacgtggcggctcgctgtctgtcattatggtgagtagttctactgtctctccgctttctctcacgcaataatcattggtagacccttcgtatctgccgagatatcgatcgttaactctaccagctatttgctcacatccaccatgggtttgtgtgtttttcagctgggggacgtacgttctggggctcgtttggctgctgctgcaccccgtcgtcaccgtcaccaccggtactacctcttatcatcgcaacaacacggctaaaaccacgttggctaaaaccacgttttttcgtgcttaaacattcctaacacgtgattttacgtgcgtttaggcgagttgaagtgccgcggcacgtacatgtcggagaacgcgctgctgatcgacctcatggaggcgcgcgccagtcaccaagagggaaactcggcgcggagcttccacgagcagctgctggaggtcccggatctgcctgcaggaggctgcggggacaactgctcgctggtcgtggactggatcgacgcgcagctacgcggactggaccgtgtcgaagcctactgccaagtatttcagtcggaggggggtgatacgccacgcaccaatgtgtatggtgtgctgagagcttcaccgctcgcagatgggaaggtagaacaacacgtagcagtggtgtgctgggtgagagagaagcttggctactaattgctgctggacttggtgtgcgtgtaggaggcgatcgtgctggtgacgcactacagaaatgttgggaaagacagtggcgactactcaggactgtcgctgggtctggcgctgctgaagtatctggcgagggccaagtggctggcgaaagacgtcattctgctcgctgcggacggtacgggttgtgcttcgagcggaggtttgagattttttttcttacgtatatgagatttgccttgtggatttcgctgtagatggcgttttggacggaagtgacgggtatgcgctggggacggaagcctggctgcgggcctaccacttggacccggtcgagagcggactgcaaggcgcactgccgatgcgcgctggagttattcgcgcagctgtgaatgtggagacgttgatgaactcgaaggaggtgggctcggtaggaatctacaccgctggcatgaacggccagttgccgaacctggacctcgtgaacactgccgtgcgtgctttcggccagcaccaaatccctacgattttggatcgcgccgatgcagcgcaagtgggtggtcgtaaccacaagggatacgtgtcgtctgtgatcaatctcatctccagtctcagcgagaaacacaccccggaagaatacaagcaaagcgcacagaactacctggcaaacctgaaggggatgctgcactttatgacgacgctggcatcgggtccttctggtccccatgcgaacttcatcagctacaacatcgacagcatcacgctgtcgttggtgaaaagtgtaggctcaagcgatcgctcactctcaacgcgtgaggtgctgcgttctatcgagatggtcgtccgtgctctcagcaacctggaagaaaagctccaccagtcgttcttcctctacgtcctccccagcacgaccaccttcgtgtccgtgggcgagtactattatacagtggctctggcgatttcgcctgctatcgcgcatttactgttcttggcaaacaaaacgagtggaatgcgggtcgctttcgcactgtcggtcttcatcgtggttgaaggcttgtgtgctttactcctggttggggtgagtcgctattttgcgtctccggctgctcttctgggagtccatggtgagcgtgatgctgcaaggtggtggacacttgcagtcatagtctccgttgtgcaagctctagtggtgttgattgtgctgccagctctacgttccgtggtgggcttttctggctgcgttgagatttacgactggcgtaagaggatcgtggtgtacgatgcggagcagcaaaagcgactggaccaagagaaggagggatctacagatagtcctgctgagctaagtgaatccagcaacgatatcccggagctggattcagggtggcgggcggtgaagttcattacgatggcgatgctcgtgtacgttgtattgccactcgatggttgccaaattttgtgtttaatatctaacgatacctatgaccaggtatgctcattgcattctaggcatcctgaactatccaatggctctcttctgcgcgattgcaatgacccacttcgcgcgagttgtcccgttctccaccgcatcagtagccaagaacgtgttgaatgggttgtggctctttgtatcgtctcctctggtgctacttgcgctcttgaaatggagtcgcctaggtacgcgctttcaccctgtctacgatattccaagcgcatatttactgataagttgtgggttgtttattgcaacagaccacgcgtcggccttatcgactgttgtgagcagcttcgtccaccgcatcaacctgctggcgctgtcgtacatttgctgcatctacgtctccgtgcacacgctgtcgctcattatctgggcctaccctgcaccgaaggcagccccttcggcgaggaagtggaaacaagaataacgagaaagatacgtgcgcacttcagtgctggattggtgtatcgctaacacttattccgtgagtacttgtgatgaacagtcttcgaacggccatgtttaggtgaatgcaaacttgttgagcagctccaacccgcgctcgggcgtcggctccaggcgtagctgatagcagtctccggcaacgagagcgtacacagccatacggttgctcccgtaggcgacgagttgcgtccacacgttcggcaaaatcttggggttctcacgaaagtgcttcttcatgcggtcatgcatgatgcgaacagatttctcgaactgcaacaagcatggggtcgggttagccctggctaagtaagtcctggcgtttatttttttccgtaccgtgcttgcggtcgcatcgagtacacgacgaacttcctggcgaggcgaatgatactggatctctgacgctggcactgacgccatgagcgattcaatcgatgcaatcaagggctgccacaaccagcacgatcgacagccttagcacccttcccacttcaaatggacttgtcggtcttggcacacgcaccaccagttgtttgaaagcgtactcccagacggaagcaacgtagagctgcaggttcttcgtgtaccgctcgtacgcctcctcggcatactgagctagtgggaggtctttcgaaccgttgattgctttcaggttgtcactcaggaagaggtagttttctacacgtgcaccaaatggaatgttgtgagagaagcatcgacattgagattggacgatagcagacgtaccaagccgcgtcagggctgcatacttcggccgtgactcggacactttgtccagccactgcatcgttgcaggcacgatcatgttgtagatggacaccaacgtgctgtcactagccttgccagctacgctttcctccatccgagcgatcatgttctacacatgcgagcgatatgagcggtaaacacctcgttaaaacagcgtttgaacgtaggaatcgtcgggtcttaccacaattttcttgactggagcaagcacacctgccatcttcgtgtcgacattttgggcacttatccaggcttcctgttgtcattccaccacaccatcagaagcaaagtagcaacacactctagaggttgaaaaacgcacctgctcctcagtgaacttgatcagcattctcttcatctggagctggaagctgaccatgacgttgtacaggaacgcgctctgctgccggtactcctcaaggttcccattcaccagcaccacgagcgctagagcgtccaagatgttccgaagtccagccgcttcgccgaattcgttcatgcgcttgagcagcttctcgaagacgccctccatcatgaccgtcagttcctcgagctcatgcttcccatctgctcgctccgtcggactggggaagaatacgcgagccaccagtcgttgttcacttatcacgagtggggtgaggtggtctagcgcctgctgcatcaacggagctgcacacattgtgtctcccacgctgaagaaggaggacgagaggtggatccctcgagattggatcgacgttggcttgtgaaagtggtgcttggaattccgaggcagcttgtccctcaagtggcggaacagcgcctgagcgtgggcattgtagacgggcgcaagctgcttgctgtatgtctgtcttagcgccgcgaggattcgagggtccagtgaattcacgtgagcaaagagcgactggtagtccgatagaaggtggtggagaggctcactcgtgaaattccagttcatctcatcgctgcctgacgacggatcacgcttgtcaccacctcgagcgttcatccactgtttaatcttccgctggaggaaagaatcgaacgaaacgcagagtttatcgccgaaagtcgccactaacttggacaattcgtcaccgcgcgctcggaatgcgatcatttcgctagctggatatgcctgagtcgactttatagcttgaaccatggcggcaatagcagcaatggtcgctcgcatacgttcggcgacgcccacatcccgaccaccatcgcccccagtcgtcacgctagtcttacttcctccgacttcgttggggaatacgtccacgggagacaggaaaaccttcatatgctgctgcggaacctccacctgagccatcaacttggccagcacttcctcaagcgagacgctgttcttgaaatgcatctccagctggttgttgagcgcctcgaagtgctgcatactactcgaagtctgtcccagggactcgtcggactcgttggtccagtcttgaatcaacgtaatgcgctgttgaagtgcgtcgatggcttcgaggatcttgtctaccgatgtactagctttggaggaactctttccagtcatccccgcagcagggagaggcgacacggatgcatccccatccaacgacagcaagaacgcgatgttctcatcctccagcgcacacagcttcttgcgaagatcgtcttcaaccgccgacagctgcgcttcgttccagttcacgtcgttcagcagactcagagcttcgtcgctctccggtgacgaaagccgaagcccagacacgtcgattcctgcattgatatccacggttttcttccccgtagcagcgtctataccagcgactgaatcatccgtcaatgctccgttcttcttcatctcagtcttcacacacaccaccaccaactatcagtagatatcccaagcaatcgaacgaaagacgcacgtaccacagactgcaccagatcaacgtccagatcgtacgtcttctgcaggttgagcttggtcgctgcctcgtgtagctcctccacattgatccgcaccagtctcggcagcaaggtctacacaacaaaccgttaaaaaatatttacccacgaaagacactcttctctcctcacgtacattattctgcactgcaagggcacacacactccacaggaactcgtgcatcgccgtcgcactttcccgcgtctccacgagccactgccacgacgtcgcctcccccgcgaagaagagcgcgaaggcgcccctcgtcttgtcgggcccaatgccattgtgctcaatggtgtccaatgcactcaagttccacgagtgacgaacgtccaccgacaagttgctcagcagttgcacgtaatgcaactccagttgagccccaccgcctttcacggcagcggtcgagtcctgcaccgtcacgcagaggacgaaatatttgctggcgttggctccgtggccaaacagtcgcttggtctccgctatcgtcttgggtttctgcacctgcaagaaggagaagacgcgcttgcgactggcgacggcggtagaacccccaccagggccgccaccggtagacggtcgaggattgggcttggtagagtggaaatgcgtgtgcagcgtatggcggacgtcatcgcgggagatgctgcccacgggcttgaccttgctcggctccatggcggatcgcaccacgtcctttcgcggccagaggtacttgtcgttttattattctacggacagacaggcagcctatggatctccatcctttttcaacaacacttaggccttgggggtattcggcaactttgtatatttctgggagctccaacacctagcgatgatagcccagctctggtatgttgagaacggctatatttgctttggcttgtgatttacttgaagttttccggaattagggattcgctcagtcacgctgactcaattagcaatgacgctgacttcgtctgagtgctcctataattggcacaaagtccaacgccagcatcgttccagccacatgcacggggtgtcattattagaaagtggtagaccaacaaccacatgggcatctcaagcgcaacgaaagctatattatggctgttgatcacgaagcccgtaggtccaaaccgatttctcgggaaatgccttgactcggcgtgggttgcacagatggaggatgaacgaggcatctccagtcgtgaacgcgattcaagtggccgcctcgtttatcccttcttgcagcaagccctcaagtatcctcgctacagagtaggtagattgtaaggaggccgacgacacggcgaaggacgagacggtgggcgcgcaaccacgctgtacgacggcgttgaagtagacggcagcgtgggacgtgaatccggctggcattgtggtcggcaggatctgctgcgcggtaccgagggatctactggatcttcgggcccgctggactccgcgagtcccacgacggagctcactttgggttttgacggccagcgagcaggcccgaggaacgcgcgtttggcagcaagcgcaacaagcggtgaacggacgaacgacaggtggacgaacggcggtggacactaacggcgacctcgatggacggctgcggcgtgaacgacaacagagtgacgaacaggaagcacgtggcttccgagttcttcgacggctgcgacgagtagggcaggcgcgtgtgggcgtacgcccgagtggctagaggagcgactacggaactgagtcgtgcgcgttcgacgtacacgtgtatttgtagttagtcggtggttgacaccgcgctagttcatctaaataaagtaggtgttgctgccagtcgggcacgcaccggcgcagtgtcttacgcttcgacactgtcggccatccggactttcgaccgcatcagcacggtcgcgaccaaaccccaagcgtgtggggcaccaaacacgttgcatggtggtcatacaggggtctagtgtacgtatccgacgcagccctcgacttacgaagacacccgaagacgctcagatggctcggacgaaggtcgtcatgcaacccacgacccgtgcgactcggaatcagccggctactcagactcagacgtctgttcccgtgcctactggaggatcggatctggcgcgacaagacggtcagaacgcgaacgagaacgaggacgaagagatgaaggagaacgatccgggcgacgcagacaacccaagcgacgaacgcaacgaccacggcgctgacgacacgcaggacgcgccacccgacgaagcggcaactagcggcagcggcgacggcacagcgatggctcccgtagcggcgctgaccgctgcactgcagcagatggcaacgacgatcgcaaggattgatgcgagactggaccagctgagcaccacagtggccaaccccgcgccgtcccctgcgcccgcggacgctgatacgcagacggtgggaacgacgaatccgtcgacacagcaggcaccgccacccgccgcaccacgggacccccccccagcggctacagctcggcaggtggcctaccagccacgtgacggcaacgacgacgaagacgacagcgatgatgacgacgacgacgggtcttcgagcagctccgacgacgacgacgaatctgacgacggccacgacggtggaggacgccgtgccagacgccaacccgttacgaggcccggtgatcgagactttcaccgcaacagacggcgagccattcgagacttggacttgccaaccttcttaccgacaccacagacatctgtgacgacgtggatcgcgcgcgttgacctggcactcgaaggagcacgactatcaggacggggcgaatggactgatcaagaactgtattacatcttaggcaataagctacaggacagcgctgcccgctggtgggtccagctggatcgtaaactacgcgaccgtgagcgaacgtggacgaagttgaagtcgtcattgctgcgacgatatggtgagcgcccggataaagcaatggccgagtggcgtgtcggccaacgtaggatgatgcctggagagacgtgcgcggactttgctgctgcccttcgcgatctgtgtggcaacaaccgaatccgggaacgtgtgctgctcgcacaggtctaccgcagtctggatcgcacgacgatagttctcgtgaagcagcgtccgaacccgacgacactggaagaagctgtggacaaagcaacggaaattagcgacccaatcgataacgtggcgcaaggcatggaaaacatcggacaagcgttcgtcaccgcacccgatacgtacgtcgtaccggtgaatgggactactgggcagatggcgctgatccctggcgtcgggagcaccaacatggcggaagaagagaagttggcgtgcttcacgaactcgcgcggcgtgtacaacaagtacctcgggctgtgggaggcaccgaagggacgtgtctggaacggacacatgtgggcacccgtactgcgaaaacgtacggctccaccagccgcaccgacgacgaccaagcgcatggcgatggcgaagactgcgcagaaggcgacggtgaacatggcggtcgctgccgacgctgactacgaggaagagagcgccgacgacgaggagacagatgcgccacgcgcacttccaccttctaagaagccgaagctcacggcccgacgtaccaaggctgcgacgcgccaagtgaaggcgccggaaactccgagaacgaagcctgagacggctctggcaccacgacaattcggcgaactgaaatgctacgcgtgcaaccagatggggcatcttgcccgcgagtgtccagacgatgaggcgcgcgcccgcaacgacgagtatctcactcggcgtgagcaagaaagaaagcggcaggaaaacgaggatcgagcgacgtagggggatcacggcgctcggcaatacgacggactccccagcgacccgtgacggtgacggtggacggtgatacggcgtgcgacacgaacgcaccgacggtgccggcggcggtgaccgacggcgggagcaagatggtgaacggcatggacgtgccagacgacaggagcgtggcagtagtgagacgggctgtcgcggctcaattggacgaagagctctcggctcgcgatgaggggcgagcagagcggtacgtgtgcacagtgcgtccagcaatggcagcgctgcgttacgtgcacaagacggatggagaaggcggcggcgtcgcgacggtgaaggattcgacgccaacggcgacagccacccctgctcgtttcgaggaggtggcagcctctgaggaaggcggcaaggcggcaaagcggcatacggcgtgcagttcgctgaggaaggcgccgcagagacgacggtggcgagcgtgacgcctacgacgggcgaccagctgcccgatgacgtggtcgaagctgaggaaggcgatgtgtcggccatagatacgacgaggaagggcgagatggaggacggagagtccttagcgctcgagctcggcgtggagctcacggacgagacggtgatggagctcggcaccgtggcgaaggtgggcatggccgtcaagcgatcgaagcgcgaagcgtagaagcagcgtgtgcagcgtgcgcgtgagaaggcggccaagagcatgtgtgacgatgaagaagtcgcgcgtgttgtcgctgagctcgacgctgagcgtgaagagtggtggcagcggcaagctgaaggagcgcgcagtgcactggaagtacgacggcagcgacgagttgccggtggtgaagacgaagtgggcgagcgagctcgtgtgaacttggtgcagcacgggggcaccgtggcggccgagaatgatgatgacgatagcggcgtgagtatggaggccagtggcggactgccaacagctgcaatgttggtgggcggcgtgcaacagtatgtcaagatcgacggtggcgcgcgctacttcgtggcgggcacgaaatggatggcacgcggtgaacggaagcaggtggacgcccctgtgatgtacgtggagggtatcggcggttttttgctggacgtgttgggcgtgtggacgttcagcatggcgaacgtgtacgagcagatggagtggcgtagcgggatcagcaaaatctgggagattaccaatccaacttaccaactgcgcccgaacaccgacttacggagggggtggcccccgatgatccgtgatctgtgtgctgaactgatcaccttgtgtacccgtcggtagggctggatctgctcctctggtgtctgctgaagcgttctagccttgaaatcagaacagtctgggcgagacgcggggatgtgggtggagcagcgcggaaatcttcactctgctcgcggtagtattccaattccagtggtcttgtacctggatctggcgacctggatctggatccggccgtggggttgcctttgggttgttgttgttcctttcctttgcctttgcaggtcttcctttgttgtacttgccgcttcctgtagcgggatccgtagatgttgagagtcgaggatgcacccggccaagtagtaactccgggtggatcggggatctgcacttgcaagtaggtcactaggaaggttgtagaactggccaatgtattatccagtctagatcaactaccagaaccttgcaaaaccgtggggcctatgtacttcccgtttccaggcgaagccgaaggcacttgcgatgtataaggcaaattcgagtctgctttatgcttaagcccaatcccatcccaaagtcctatcttgctatagatcctatcatcccatctgtatctactgactctatggggcttgattatcttccttgcgtgccgctagattgcctccgtcgagccataaccttagatccaccgttcaatcccatctgagtccgaatcagaatcagatctggattggatcggatcgccgatccacttgacagctgcatctcttggatcttgggtctcgaggcattgcgttgcttgggcacacattcgtgacgtccggtcgcactcgtagtgtcttccgttgcaatttctaacatctggtacggggcccgatccgccagtctggtggatccgtcgcggagtctgtatccatcattctgccgatctccctttgttccaatttcttggatcctgcttctccacagtggtgactatcgacgcatgcatcgtcgaggggtgcaccagcgaattcctcgtgggcgtggacttcctcgagggtcatcgggcgacaatggacttcgactgtggcgaagtgcgctacgatgagcgcggcggcatggcggtcattccgttcatgacgacggcggaaacgagtgactcggcgacggcagctgtgaggctggcccgtgccacgaacctacaccgacgtgccgtgcagacagtggaggtagcgattgcagcaccggttggcgaggaaggagtgttcctgccgacagtgaacaacggagcggtgctgctcgcgtcagcagtgaccaaggtgacgaacgggaaggcgatgatacctgccattaacacatacggtggacgcatcaagttgccgagcagaaaggagctaggtgtatggatacctattaatcaagacattgagctcttggcgatgcatggtgagttggactcggagcgtgtgaacacgtggttggacgagctgggggacgctgacacgcccttggatgacgaacacgacgtggacatcggtatggaggagccgggcgcgcgtgcgctcatcctaaaactattgcgtgcctatcgagacctggcaaacgcacaagacgagtgtccgcctgcaacgatgctcaacgtggagcaccacattgatactgggaacgctgctcccattatgatgcgccgacgacgccaagcacagacggaagacgctattgtagatagtaatgtcgactctatgctgtcggcaggtgtaatcgagcatggtgaaggcgcatggggttttcccgtagtactcgtacggaagaaggacggttccgtgcggttctacgtggactacagggccctgaacagcgtcacgcgcaaggacgtctacccgttgccgcgaatagatgaaacgctagagtctttgggcggagcacgtctgttcacgacccttgacctacgatgcagattcgtgtggcggaagaggaccgcgataagacggccttcatgacgaagagagggttgtaccgatttcgacgaacgcctttcggccttaccaacgctcctgctacttttcaacggctgatgaatggagtgcttcgcggtttgagatggctgacctgtttggtgtacttagacgacatcattatcttcacgaagggtggtatcgaacggcatgtgattgaacgagcgggtgtattcgagagattaagggcagctggcctaagtctcaagctgaagaagtgtacctttgctacgacttcaatggagtacctgggccaccatctgagtgaccagggcgtgcagcccgctgagcggctggtgaaatctgtgcgggaattcccacgacctacggacgctactgaggtaaagaggtttgtccacctcgccggttactaccgtaagtttattgcagccttcggctcgatcgtggagccgatgactcgcttgttgaagaaggacgtgcagtgggaatggagtgaggcgcaggagttcgcgttcgaacgtgtgaagatgttactcactacgcgacctttgctgctctactctaattttgaactacccttccgcctggtgacggacgctagtaaggttggcctgggggcctgcctcatgcaggatcacggacgcggctggcagccgattgcatatggcagtaaagtgaacagtaaggcggagtcgaactactccatcactgagctcgaatgtctcgctgtggtctggtccgtgaagatgttccgaccctacctgtacggcagagccttcacgatcatcacggaccacgccgcactcaaatggctcatgactcgaccgaacatggccggatgattgcatcggtggtcactagtactacaagaatatgagtttcaggttgagtaccggcctggttcgacgaacgtagtagcagatgccttgtcccgggcacctgcagccgtcagagcagcggtaggacggcagcaacggcgcccaacgacgccaaggacgacggatgcgaataatacgacgaatgcgggcgaggtaacggcgacagctccgccgacaagcactgcagtggcggagacgacagcagctaacgccacaatgacgacgaacgacgagatgatggcggtcgcgtcagcggcgacgccaccgagcggtgcggcaagccgggcagccaccacgaacgggacgacgggcgggatggcgccccagatgaccgacaagacgccgggcaccacgatgctgacggacgggaatatggttccagcagcagctgtgggtcagacacgcgagacgacgggcgagacgacggacaagacgccgggagcgacgacagatcagctgacggatgagatgacggcgggtggcgacatggtgcgtgccgtcaccacggccgaagcagatgccaggacgacggcagcggcaggggtagcgcggctgtcgatggatgaagcgacgccgacggatactacggcagcgccaaacgtcacgacagcgagcacgacggatggcacccggacgacgatgatcgagaggacggtgacgggcaatgacgacggagcggcagcacccggtgaagacagcgaggcagctggctggcaccaccgtgactgccacgaccggccggaagcgcgtgaagaaggcggcgaaacctgcaacgagacgcagtgagcgcctccgcgaacgcgagcagcggcacgcgcgttgggccacgacggtgacgaacgcggacgacgcgagcagcccagcgcaaagtactgagcgagacgcacccacggaaactacgggagcgacgacgactacggtggctacggcgccccggacgacaccaggagccacgcttccgacgacgacaactgccccacgtgaccaggatgcagccgtatcaggtgctcgtacagtgcgagacgatggacgccatgcggcagccactccgacacggactccggcgacgagtacgccacgtacgcagaggacgacacctgctgaccaaggtactgcggagacgagagcaaaggcacccgcggtgacgccaacgccggcgagaacgacactgacggcggtgacgaagcggaagccctcgaccaagggcgcggccaacacgaagacggcgggcaagacgtcggtgacgacgatgaactcgacggcggccaagggcacgacgaacggcgccgtcacgatgacgaacgatgtgatgatggtgacgagcggcgcggacggcatgggcggcgacgaggagagcgcccctgtggacgactacacgctccaactgagcgatgacgaactggtgacggcgcagcagcgcagcaagttcgtgaagcgtctggtagcagacggcaagtacggcagtatgccgatcgcgaacgagtacggcctggtgacggtcgacacgccgaacggacggagagtggtgctgccaccgacactttgggcggctgtcttcaaggaaatgcacggcagtgtgtggagcggacacctgcgcggtcctcacacgtatggccgcgtagcccagctgtactggtggccgggattgtaccgagaagtaaggcgatgggtgcgtggatgccctgagtgcgggtcccgaaaggcgaaaccacatgaagtgataccgccgttacgaagtttacgcggtggtgcggtgggagatcgttgggcgctcgatgtcgccggacccttcccagcagccgacggaggtgacaggtatgtcatcgccgccgtcgaatacgtaacgaggtatgctgtggcgagctgcgtgacggaacatacggctgagacggtggcgacgttcattatgcaggaggtggtgttacggttcggggtattccgtgaactgctgacggacggagcgccggagctggctggcaaagtgattgaggagttagtgcagctcctgcaagctcatcaggtcaatccgtaccgtaccgacctcaactcgttggacttgtggagcgctttcatcgctcgtggaaggactgcgtggcaacgttcatgcaagacgaacgacaagtcgattggaatctttgggtgaaattcgctgtttattcttacaactcggcaaagcattctactgtggcactgagcccgaaggagcttatgatgggacgacggctgagggctcccaacgaactgctgagacggacggaggtgacggaagcgggcgagctgccagcttaccacgcgaacctggtgaaagcgatggaacggagtcatgagtgtgcagagcatgctcgacgacgcgagcaagaacggcaggctcggtactataatcggaagactcggaacaggcggcagtttcaggccggcaatttggtctggatgcacaacccgccccgtggcaagaacgccacgaagttcgtgcaccagtggatgggaccactacggatcgtggaacctgctgggtacgacaacttcgtgctgacgcgtgaggataagacagggaaggcttagacgttgatctcccacgtgtctttcctcattagttatcattatcctgaagcactactagcgcagattgcgcgcgacattgacgagcagctcaacgatgaagaacagcggccaacgcgggatgaaccggagacagcagcggctgtacggtcagcgaaggcgccagctgggcgaacgacgagagctggaaactcgaaacgaacgcgagcagcagtggatgacactggtgtgcgcgacgtcacgcgtggactcgtggtggggcgacggagaaggcgacggcgcaacggagccgggcagtacgtgctcgagtacgagctgtgtccgtgcagtgacccacgacgatggctgacgggcgacggtgagctatgactcgacgcagatggacgcccacgagcacggtggacgtcggtggctcaatacgaacgactctacatggacgcccgggtcgtggaagaccttgggtatgcggacgacgtgtaaggaggccgacgacacggcgaaggacgagacggtgggcgcgcaaccacgctgtacgacggcgttgaagtagacggcagcgtgggacgtgaatccggctggcattgtggtcggcaggatctgctgcgcggtaccgagggatctactggatcttcgggcccgctggactccgcgagtcccacgacggagctcactttgggttttgacggccagcgagcaggcccgaggaacgcgcgtttggcagcaagcgcaacaagcggtgaacggacgaacgacaggtggacgaacggcggtggacactaacggcgacctcgggggacggctgcggcgtgaacgacaacagagtgacgaacaggaagcacgtggcttccgagttcttcgacggctgcgacgagttgggcaggcgcgtgtgggcgtacgcccgagtggctagaggagcgactacggaactgagtcgtgcgcgttcgacgtacacgtgtatttgtagttagtcggtggttgacaccgcgctagttcatctaaataaagtaggtgttgctgccagtcgggcacgcaccggcgcagtgtcttacgcttcgacactgtcggccatccggactttcgaccgcatcagcacggtcgcgaccaaaccccaagcgtgtggggcaccaaacacgttgcaggtagatgctagtcaccggttacgaatcctggctctcacaaaatcatatattttgtacaggtagatgaccctaggacatcatccgaaacagcgtttacagatcaatgcatggcctctgatgctgtgttcttcggtgccgaccaagacgcccaaggcaggagccgcggccaggtgaacggaacactcgttttggacctttgtgcctgggatacgcacgcacttgccacactagtgttggcaattatggctcaagaagtggtacgctcacctacgcttccttgatgcctggtagtcaaatgatttatgaacccattttgctgtcacagagtggctacaaagtatccctcagcaaaagtggcgtggatgtggacataaccgagcgcatgtcgtctgttggatcaggtatgtgcaccccaacgcggaagtctggacatccagtacaatgtcggacctgcgggtttacttcaacgagtcctaccaagccgggaacgtaggctactacggactttcaggagtctacacgaccaagaagtttgtatgtcagcctctccgccctatttcccagatttttggaaacactacaagcttagcgatgacctcatcaacgcactgagcgtcgtgtcattcaaggccaactcaaagtattaccctccagcagacgatttctgccccgacggcaccatgggatgcaaagacaactgcgaaaagacggaggcatgcacgcagcgtgagttgaatgggcaagactgcctcatgctagcgctgatggtccctggttacgaccaaggttacttccaggctgtcttcgccaatctcaatatccccgcctacttttgttttctggactaggacggagtgaaccaatttgcatcggatgctgcgaccaacggaacgcccgcggtcttttaccactacgagcctgatctattccacgtgacgcgcaagggtttgttcacccgagtgggtcttcctcgaactgaccctgcgcgtgtgaagctcgccacgggggattatggcgagcacggattcggtaaaaagacggacaatcctgtggatgtggactacccgagcctgcccctctcaaagtttgctgcatccatagtgaaagacctgccgattggctcgttattctccaagctatcgctctccgatacagatatcaacgaccttctgactgagtatagcatcgccatgagcgacgcagccgaacccgagccatattttcgagctgcgtgcaactgggtgaaagcgaactacgatatctggagcgactggctggaccggctccctttgtgcacgtttgaagaccatatcgtcagccacgtgacggggtgtgaaaacggcagtaccgttcgtaaattcagctcgcgtggaatgtaccgaatccaggcaatacgtcgctaccgtacaactgcgacggaggtgtggccgcactacccgctacaattgccactagccgatcctgtcagtggatctctgacaacagccgggtctgggccggctggatcgatatgaaacccgaatgcgactccaccttctacgactacaatgtctcgcaatgtgactcgaccgcccatcgcacggttcaatacttctggaaactcccgctagcacagaatccgctattctctacagagtgtacaggtggggtgagtcttccggaagatgtgaaactcgactgcgagtacatgcccacgtcttcaccaaccttctcagcgctcgctgtacttgcagcgattgtagccgtgctccttctggtggctgcgttcttggtgtacaagcatcgcaacgcaccgatcgtcaaacggtcgcagttcgagatgctggagctgatgatcttcggaggctttttcaccacaggagcggcagtggcgtatgctggagaacctcgcggctgttgtgcggaatccgaccgatcctcgtgtgcatgggcttcactacaatcttcggcgctctggtcataaaatccttgcgcgtctaccgtgtgttcatgagatcctccatgaagcgcgtcaaggtgacgttctttaagatcgtcaagatgctcgccattttctacgtgggggacattgtcatcttcgttggatggtacgccgcagacttccctgagcccaccgtcacaacggaagaagcttccgagttccgcggcgaagtcgaccgaatctcgtgctgctcttccagcttcatcttcacggcattgctgatcttctggaaactgattttactcgtactggggctctacttgtcgttcctcatccgaaatgtatcagtggattttcaggaatctccgtggatttctggctcggttgttgtggtcctagtgggctgcctcctcatcatgccgatgtcgtatctagtccagatgcccgcggcgacgtactacgtatttctagcgtgtacgctgctcatctgcacagtgttgatcatgggtttgatgcttgtgccgaagatattccgaccgaaggaagtggctacggccagttctgggagctcgaagagtgtgaggagcaggctgtcttcaaggtcatttctggttgcgggtggcaatgtgaatgcgacaaatgcgaccaacatgaccaatatgaccaacgcgacgaatgtgacggaaaacaccataacactagacggttggagagcatctcagcagaagtaccaagtgcagcctgttagcgtctttgagacaacaagggagtcgaattagctctttaactgaaatcgaagcaggtggacacctattaattacagtatctaccctgcgtgttacatgttcttggcacaacctcagaccgtcgttggttttgaacctctaaagaagaatcaaaattcaggtggagatagtgaggtacaagtcttcttctggtaaaaagcagggaacgccctcctcgctaattaggtgttgttgctccaaggctggaccaaatcatacttgccaagtagtccttcgacttgatcatcctagtgaaccagtcaccaacaacgacaccgccccaaaagggcaactgcgagacgccacccgaaggccccagaggcaaaatcatcgccgcggttccaggagctttgaatggtttggtgaatcccaactgcttcttgcgaatcgctgctacgagctcattcgccaagaacttgccctgttctccagcgatgaaggccattttgggggaggcgtggttgcacacatctcctattgcgaacatgtgcgcgtacttgtctccttcaagctgcagctgagcattcaccttcacagccccacggtccgtcaccaacgaggcatccaagccctccaccaactgccccacaggactgaagcccccacagagcagctgaatgtcggactcgatctccatccccttgtccgtccgcagcgtccgcttctccaaactattcccactcagacgctccgtcagcctctcgcctaggatcactttgacttggagtttctccagccgcgcgttcaatctggcgtagaatttggcggtcaggttgttgccatagataagctggttgtgcacttcaatgatagtcacggtcttggctgggtacttggtcttgatctcagccgcaatctcgcagcctacggccccaccgccaaccaccacgatcttctccgcgctatcgatcgcactgcggacttcttgaagtttggtctcggtcgttgagcgagcgtagtcgtgagtgtcctgcttgatcggcaccgagtaggtgctccccatggccagcacgaggtagtcaaaggggagtttctcggttgcttcacttagcttgtcgtcgctgccgatggagtggtaatacacttcgttcgtttccgccgagatgctcgtggctactcctcgcacgatccgcacgaatttggctgcttgcgttgggatggctttgtcgtacggaatgaacatcttcttggtatagttggcgtctacgtacgcgcgtggggcgcccacgacatggtagaagtaggcgttcttctctagtagaacgacttcggtgttgtcagctggggtgagcttcctggcaagcgcttgtgccgtgttgataccctcagctccacccccgatgatcacgatgcgggtcactttcgtgatgctgttggcgtgaacttgggacatccgttgcttttgtctgaggttggccttccacttgtgaggcctggcacaagacttttcaccaaagtattatcggcggcaatcgaacagtaacctctccaagcatcaaatccatgccccccctactggacttacctaaaatagcggcgagtttgggctcgctaaagagctccaaacaccgcccaaattggttttcgcacgcgaatgagcagcagttcctcacggggaagtccacgccttcagcctgccctgaataccctcatgaaggtgggctgttcagtgaacagcgttcacatacgatcaaccccaatttgctggtgctggtacgaccaccgtcgctatgtgcgtcgtcatgtccttcaaaataatgagcaagcgggggcgacagtgttggacgatctaacgcaaacagaggcatcaacagccatcggcacttgggcatcaagctcagggcatcacacggatacaccacctccggttgactatcgtcatcatcagcgcctcggctcgacaaccacatgtcaatttgaatttggtgacgccacaaaatcgcgcgcttcccccagcaagcatcggcgtcgttcggcgccaccaccccctcggcttggttcctcatgatttctcatggtttcacgcttcccggtgcacccccgtccgacgagggctcacttaaatcagctcttgtttaacacctcgcatgaaacgccacccaccgaccaccaaccagaccacgttggcccttgaccaaaaggctgctcatagctctggcaactcacgaacgtaaagttattgtggtgcttgcccgcgctcgtcgtcggcaaccacttccccgcgcgtcttcgcgcctgcggccgcgcctttgccaacgccgttcctcgtggatgggatcaatcaagcaacaagctccgactgaatcggtgagaaaccctcgacgcttgtcccaaaatggctgccgctgtaaaaccggcgacaggcgaagcgacgacatgtgtccgagcactcgccaggtggaacgctctcgtacgtggcgaagtgagactgttcgtgagctcaaggaagggggataagacccacgttccttcacttctcgtttcgcagccagccgccagcgcaatcccccaaacgctgcacaacccccgacatccaccaccacgatgtacgagcccaagtcgctcctcaatgtgtcgcgggtgctgtcgcccgaggtgcaagcgcttccgcacattgtcgagtccgtcagcgactttttgatgcccgcgaccattgacagcgccgtgtttaacgacctcacgcgcgtggtgaaagctcacggagactcgcgcgcctggacggtggcagcaatggacggtgctgcagcgagaggacgactcgatatcatgcagtggctgcacgacacgcgaagtgaaggctgctccacggaggcatgcatggcggcggccaccaacggctacctggaggtggtcaagtggctgcacgagctgtacccggacttctgtcgccccgtggaggcgatgacggtggcggcggagaacgaccacgccccagtcgtccgcttcttacggacgagcgtcaatatgaccgacgctgtccctgcactggaagatgcggcggtaaatggccgcgttgaggtcgtggacgctctcgtcccctacttctcgggtctcgcccagggcgcgttcatggtggcgtcggccaatggacagctggaggtggttcggctgctgctcggtcatggattcacgagcgtcatgtacacgaacccgtcgctgagggaggcggcagcgggtgggcacattgagctcgtcgacttgttgctggacttctgcgacgatgacgctctgggtgacgctgtcaatgccgcggtggaagtcaaccgcaccgacatcttgcagatgatcgtggagaggcgccacccgagagacatcggagcggctctggagcaagcagcgctggacgaccggtgtggaatggtccagcttctgctcgacaactgccccgaggagaacgagatgtatttgtcacgcagcccggcacttaacaggggagaatcgacgaggtggcacacccagcgatccatcaatacagccaccactgcagcagccatgcgaggccacctcgagacggcaagactacttgtcgccaagtgcaatgactcggcggctggtatggccttgaagaccgcagtggagaccagccacctcgagatggccaagctgttcgtcacgaagagcaacccggtgggtaaagtagacgcgttggtggccgctgtgctcaacgaacagctcgatattgttgcggctctgcttgagcatggtgacgctcgtatgatcgagcaggcgctggtgaaggtttcttctgctggcagccacgcgatggcgctgaagctgctggagaagtgcgacccggagtcctgcaggcgcgtgttcgagactgcagcagccaacggtgtcgtcggactcgtgcagcaaatgctggacgaagtggacgagcgggaggcgggagacgcgctgcggtttgctgcgatgaacggccacacggaagtggtgaaggtgctgctcgtgaagagcgacgctgctggtgtgacttcagcgttcaatgtggctgccatgcagggccgactggctgtggtagagctgctcagcgaacgggactaaatgctgaggaaaaggatactggctgaataccaaccagtatgagatagagttcatgtaatttgaagaatgcaaggtaagatagatgtacatatgaagtttgccatgcattcatgacacacgtccgtttatgacacgggcaacatacgtcaatgctgctttcagttgctttaagactagctgagcacctcgttcactgcgcttcagtttatttcacgatgcccccgatcgaaaccttttcatacaagaaagcttaacagcctgatacgctgagaaatcatttaatttgtcgtcaaacttcatttagttgacctgtagtgctaggagtaagcgagtgtatcgagattgtgtatcaacacttcacacgcatgcctcatgcgcagacctctaccaatacgggaatttccgaatttttcctatatcctggcgatcactgacagaatatgggagaaattttgaaggttctacatcgtttgaagtgctttcttggagctatccgccagtgttggtagtctgttcgatttgctttatctgtaactgttgtgtactttgacgtagctgctttgtatagcaagctgcatcaattgcttggtcggttttgcggtcctccgcttctgctcatcgattttgataacctgacattttcctttagtgcactactacaccgttgccgagccctggaactctcggttaatcttacctccgcgcaaaagtacgctgaaaatagttgtacttttgaaaacgaataacggtaggcaattgggtagcaacaggacaacaggaataatgttaatttctcagcgctttagcaacacttgcattagcaatcctttcgtggccaatgggtccccgagttgacgtgtattgcgccttttagtctttgtgccgctttttgtttaagattgaggctctgtacttgcaagaggttgaatcagtgcttattttattaatgtcttagggaaacctaacgagatacccctattgcatgagacgcccttcacggccagcacaaaccatatgcccctcatttaaaatttgcctcataggaatgacattcaaagtaccactgaaagtggtgagaacgtaggcagcatacttcggtatttccatcaagcgaagcgaagtgggaattaagttttcctgcacaagagaagaaagccacgttcccacaactggagcccagtcatggttcgctcagctgcatcaagttcagcgacccgctcatgctgaagagccccatggctatggttaggatagactgtccgataagcggttttcacccgggggtccgaggaaccttcggttctgagggaccagcggtttttgctccgccacatcgcacagagtagttatagataggtagtcgttcttgatcgtctcggccggccagtcgcgctttcacctgctcgaacacctgcttcccacgcgatggccaacttttttcttaacgttgagtgcggcagacacagtatggcccgatttctttagggcttgcaatccttcattgactatggaacaagctgcacatcaaacgtctaaagaacgacataagtaccttaacgaaaaccctgattttgctgccaggcattttaacagaaggtttaaagcttttttcgaccacgtacttcgcggcccaagccaacctctgggtgaaattattgatttcttttggcgagttgagtttcagcaaagaggctcacctcatattcatgcactattgtggataaaagatgcccctgatgtccttgagctctcaaaaacagaatttggtcgcatttaattggcagcatatattgacaagtatatttctgtattgataaagtcgctcgatgacctagatttgtgccagtgctccgtctgcaagtcatcacggtctgcaagcattgatattttggcaatgcgaccgccatgtggcaattcagatgaatgggcacgcgatatctcccgattagctcgccgagtgcagcaacatgtatgctacagtggatcttcttgtcgaacgaaagccgacgaatgtagatttggctttcccaaaactcttcatcctcgcactgaagttgaggtaaaaactgcacctgacggtaccccgtcattaaaagtactattaaatagagactcaccctcggtaaacaatttttcgccaataattctttcgacttggcgcgcaaacatggatatttagagtataggaaacgcgtatggcgctgccgaatatactgctgcttacgtgagcaaagccgaacctgacacattgcgcttccgaagcactgttgctgcagctgttaagagatgtgacccgaatctcccttactacgctattcttaaaagaatagctaacgccacattggctgttcgtgaggtaagtgccctagaagcttacttcatactgcttcgggaattaaaaatgtatggtaagtctcgtaaagtaagccgagtgaaggttttgcgtcatcacttgcgatattaccgagttgaaccagaagccttacggaacttgggcatcgacaaaccgcctcaacccgataatattaaaattgaatcatacgaaaaagccaacatggcgcgtcctcaggaagaaccgtttaagtcgatgtcatatgctagctttgtagagcactatgaggtagttgaaagcgcaacctcaacagcgaagtattggaagcgaatcgataatctaggttttttacgacagcgtcgaaaagcccaagttcttcgtatgtcgccatggatggcaccagacacatcaaaccctaacttttgttttgctgagttgtttttacacgttccttggagacacttaagcgacttaccgattactgacgatgactgtattagtcggttctacgacgaacaaaataaaaacctcgacaatgaactccgaactgaagtgaatttaaaggtaacgaggcaatgtcaattaaatcttctgaagaattctcgcgagaaccaatgctgcactaatctgcccccgtccgagtatgttttcatcgaagaacctgatgagcacctcaatgagcatgagatggaaatcgagagagataaaaaacttattgcagaccttcatactcaatggaagccaaagcacaactactctaacgaagacattaatagagcacgcgaatttatgacaaaatatgtgcggtcatgggcaaaagatcagcgagaagcatttcatttcaatttacagcaatcccccgatcacaaacaaagattttccaaaccttacgtacgcaaaaaacggcccagctaagctattgtctctacagcagctcttcaaggatatacacctggtaataattgacgaatctagcgtaatatcatgtggaatgctatattggatagaccaaagaatgcgagagatatggcctgatcagcgcgaggtccgatttggtggaagagatgccattttcacgggagacagtgcccagttggaccctgtaaccccttactctctagcgacatccacagatagaatacgtgacaatatccagcgcaaaggacgcggaatttgggaggaaattaaatgcgtatgctcgttaagcagtcaacatagagggaaggatgacccggaatggtttgaagcgctacgaagattgcgagaaaaagtaccaacacagtaggacattgacctttttaatactcgattcttcaaaaccaacgcaatgcctgagtgggtgcatgctgcgaagcacattgcataccttaacgcagatgttgatagtgctaatgacgtaaatctgcagaattcttcttctccaattgtgcacataaagtccgtgcacaattgaagcaaaaacgcttgatcgcaaatagagaagtacctcaaggcacagttaaagctcttttagatcaggcacaagaaaaggtcccaaggagagaccgagttgtaccaatccaactcaatttagcaattggtgctcctgtcacactaacatttaatgctgagcaaacagcagggctatgcaatggaacgaacgctactgtgtacgacatgatctttgtgtctggatcagaacttcctatcgttttggttgaaataattgatgaatactttggtccatcctttttaccaaacgtacctaacattatccccatcatttcaaaggaaacgagctggggaagtacaaggagtgactttaaagtcgttcggtgtgacattccgttaaggcttgcctacgctatgacgattcataaggctcaagggcttacatgctcaaaagtcgcatttcattccaactcactgccaaatgcatcctatgcttaccttgctctttcccgcgttagaaaaagagaatatatagttcttacgcatcgtttgagtttggaaaagctcacagcgtccccagagagtcgatcatcgtttgacactgaaagggatcgcatcattcatcttgttaaccaaactaaacttcatgcaaatatttttctaaatgaaatgaagacgatagcacttttccacaatctcgatatgttgccaagataataaaaagaaagcatgttggcgaggcgtccaagtcgacccaagttcacattgggtacaagcaccgcgaaaacaaaacctggcaaggcaagcctcatggttggattcggtttggagtctcactctcgaaggtcggccgtcaatatgggctgcgagcgagtattgacgtggctcggaggcgacctcgatcagccacgtccagaagcagcagcggcacagtagtcatcgcttggcggatactactacgaattgcaaggggatctggcggtgggtgttgtcgcggttctcttcctcgatgtgcgtgtctacgagcacccacggagcaggccattgacttggcgcgcccgaagacggtccgtgaaggcgtgtcgacaacacaaggtggtgacaaggttggggcgggcggtgacggctgtgcatggttcgcgatcgctcacggctccacggagtagctagcgtcttgcagccaatgcaagcctcaacgaagctagctatttcgcgcagcaacgtttccgaagctaaaacagggtcgcttgtttagcaaaatagagtattcatttagctaaaacaatgcagttttacgccaaatccatatataccttatttaaaaggggcctcctaaaagacgggcctcagtttaatggctttcgcaccatttaatggaggctaaacccctgaacttctatgaatagtcactcggaacggccttaaaggatcttatacagaggtaaaatgcggcatttttgcccctgggagaggcaaccattaaacctttccctagccctatccataaaatcatcgaaagaaagtaaatcagagcgataaaacagagcgatttcattataggggggcttcgccccaaagaaccagttgctcatatgttgcgtcaacgctactgagcgtctcgcacgctgtaccagaggacacccaagctatcccgtacattctcgagtacatcaacatgtgcctcctcccgcaaaccgtcgactctgccgtttacaacgacttgcagcgggtgctgcataccttcggagacctccttccgtgactgtgcgtgcgatgaacgtcgctgcggcaataggacgtctcgacatcgtccaaaggctctttgctaccaggtcggagggctgccccattgaggctttcgccagagctgcagcaaacggccacttggaggtgcttcagtggctgagacaacactacccgaagctctacgtctcggtgctgtgtttggttcgagccgtcgaatacggtcatgcagatgtggtgaggcttgtgaagcaggacctaggtatctacatcaatacccatggcggtagctgcttttaaaggctacgtgggcgtgctggaagctttcaagccctggccgtacaacgtgaccagggctttttacgccgccgctgcgtgtggtcacgttcgggtgctggagttggaatgtaattactcgagtgggatattgagtgctttttcaggctcgaagaagcgttgaaagtggctgcaatacgaggccacgccgcggcggtcgagttcttgttaccgagatgcgacgaggacagcactagtcgagcgctgtgtgttgcagcgaaaaatggtcggactaatgtggtcgagctggtgctttccacagcaaccaacgtagatcaatttaggattgggatggccgccactttgacatggtggagctcttgctcgattggtgcagagtgcgagggagacctcctgtgaggcccagcaatgcttggtcatgacataccacatccatagttcattccaatcgccggtggcaagagatgatattagaatggtggagttgtttgtgcagtacaacaaaagaccaaaacttctggtgtaagatagctatggctgctgggaatgttgtctcctgtggtcgtattgcgatggcaaaagtgctggtcggtggatgcaatgcgtacggtgctggccgtgcacagatagccgcggtcacgaaaaaccacgtcgagttggtgaaactgtgcgttggaaaatcaaagcagactcgcatagcgagtgctcgcattcaggcggcgcgacgtgaccagctggaagtagttgacgtcgtgaatgagcacctcgaccaaacatcgatcgtggaagcattcgttccagcctttcgcttgatgcgagtatcgtcgttttgaagaagatcttgagaaggtgtgggcgaatgctctaccgcacgattttcatgagggctgcggagcgcgggtttctcggtttggttgcgattttgcagaatgaagtcgatacgcagaggattgaatgtgcgctcaggaaagccccttcggatggccatactgaggaggcgaacgaattacctcgtaatagccacttgacaagtattgggtgtggcctaggagaagcagcagttaaaggcgaagtgggcactgttaatcactgcgcgggcgcagtgatgcagcaagtatcagcagtgcattggcgtcaacgcatggggttgaccaccgtgaagtcgtgcaactaccgaccagcaagaaaccgcggctggggtgaagaaatcgtggccagcatgaacacggtaaaggagtatgcatagcagcagtggcgtaaatgcgttgggatcacgaattaaattttaatttactgtttttcttcctgtttgtcttcttaaaagaagaagaaacagctcttgaaatagttgtcatgcgaatcgactcaagcacaacagcactgttcatatcaatgcactcatgcttctgatattacttaaccgacaaacgaatacgagtacgagtcaaacctccggttaattggtcaaggattcgcgatagcttctcccaattctcaattgccggcctcacaatcacgccaaccgagcttttttgcggctcagaagctgcacgatctcgtcgtagccaacaagctcttaatgcatgaccaacaccgacctcgccgcacttcacaaacagtcgtagtccaacctctaggtcgtcttcagttgtagcttgttccagcatacttgtcatgcatcgtgccatccgaggttctctcaaatacttttcctcgcacatttccagcaaaagcttctgaacttccctctggtggttagccactgcatggcgcagtgcgtcacctgcgaatgagccatatttcttcgctagaatcacgagcatatctaactgaccagcatccgcagcgtcgataatagcctcagtgacatgggtgggtaaaccgaaggccgccccaaacctgagttcggccgcttatttccatcgaagggcacttttccagcaggacctggaccaggtcatacttgttgttcgctgctgcggtcatcaacactgttcccaacacctgttcatcaacctggcacctctccaatatcaaccgcattgtcttcgcaccgatgaccaccggcagggatcggacaatatccattgtttatggattgttgttgaggcggccgactcaatcaatattatagcaatctcaatatactcctcaatacattgcaatatgcgtatctacttgtgtatcttcaagttgaagtcgtcttcacagtcttggcagaggcataaatagctttcgggtaggccgcacaagacgggagagcacggtagacagcggagtcgtttgagcgttcactttcgaattgaccccctgcaagcaaccgtctcccccgacctcaccgccactgcaccacgctcccttaaagcaccactgcctgtaaacgcccgcaaacgaatcgaacacatatcacgctcctcaagcaaggtttcgtcgctcgactcgcacgcgcaagtcacgaacccccaagaccaacgcatctcgaaggccgtcccgaccgatccaacccgtcctgccggtggctcacgtacaacaagaccagcagcacgtgctctcacccctcaacatggccaccaactcagcattcaccctactcggcccaaaactcgactccaagactgttgttgccatgttgtttcgagaaccaagtaccctgggtcggacgtgcaacgcgtgcaacatcttcgtctagcagaccaagagggccggatacaccgacctgctcaaccacctcgtgtccaagcatcctggctacgaggatatcgcccggaagtgtttgcgcgaaaagcgcgtcgtcaccatggacatgttcgtcgaccggcacacgcaagagacgtaccagtggatgaatatcgtcgtccacaaaaacttcacgtttgctgacgtggatgacgagacggtgcgtaccgccgtcaagttcaactctatgagctcgaagaccctgaaagcccgtatgtcaagttgcacgagcctatgatcatagaagagctcaaggacgagaggtatgtgctggtcttcgacgctgtgaccgacaacggagagcattcgttggccgtatatgtcgtgacgcgcaaaggatggcgattccttgccctgtcatctttcatggatgagcgcagcatgacggcggatgagcacatccggttcctggacctaattctcgaccagtaccaactcgacatcgcgaacatcgtcggcatcgtctgcgacaacatggagaccaacaaagccatttcacgacgtgtctctgcgcctatgataggttgcgcggcgcatcgctttaatttggctgtcaaggcctacatcaaagcatacaccgacaccatcaagaaggtgtctgttctgatgcgcaaattgaagtcggtcaagcgcatcgccttgctgaaagcgaacgggtgcaagtagaagcccgttgcaatgcacgagcttcggtggagcggcatccaccgcatgcccaagcggtacaaacagctccagccgtacttgttcttgtttgagcgagactgcgaagttgataggtgcatccccgaagatacccccgaagacgacacgcgacgattccccattgtacagtacctgcccagcccagaagaccactgcaccattttggatcgcctagacgacatgaatttgttggagttggctacgaaacgattgcaggcacgtaacctgacgctcgttgcagtgtgagacattctggacgagacgttggtcgacttccccgagatggcagaccgcctcaaagccgacgccgacatcgtggagtctcctgcgttcgagatcggcgtggtcaagatcatgcaaggccgcgaccaagatctaaccgcagaggaagccgtcgctgttgtccggctacagcgcttcccagaagaagaaaccaacacccctgcgcgtgtacctacctcgaagcgcaagcgaaacagaaacgtacccgggcgcacgtcagcagcgaagaagatgcgcagcaaaacaccgacgagtcctgcatcaaggctccgaagccgttggacgccgccccgatgaatgcagcggacgagcagccctcgtctcgaccatagtgcagtctttggagaatgtcgagacgtccgttagccgcagctccgtccatggcgccaactgtatagctgcggaatccctcgaacgccatgagcacgcgccgcaggtcgtagtacacggcagcgtcgatggtcgacggcagaataaagtcgttgacgagctgcgttaagtgggggatggcttggatgtgcggtggtagcgcgtgctgttggaatatgcaatcagacagtgtgaagtcccagcccgaagagacgacgaccggggcgcctatatggtgtaacggtctaacgagctatggtcaacaggtatgttgtgagttcaatccccgcggcgcccaaccttttccaacacatgctgtaccagcagcagaggcggagaactaaggaatcctgctgagtaattacgaattaactcgtcaatttttacaacttttttgtccagcttacgttgcgcatggttgagcagctttgcagcttcaaccagatatgttcgcacttacttttgtacgagcgtatctcttcgccaacctcattcttcaattctcaccaacggcagcattgattctccaccaccgccgccaccactgctgatcatctcgcacgcttccgcacatcccccagtccatcaacatgcgcctcctcccgcaaaccgtcgacactgcggtgttcaacgacctgcagcgggtgctgcacacctttggagatttcctcccgtggaccgtgcgtgcgatggatggtgctgctgccagaggacgtcttgacatcgtccaggcgctgtttcctaccagattggagggatgttcgaccgaagctttcactggagccgcacatggaggtgctctagtggctgagggagcactacccagagctctacgaccccatggaatgcctagctagtgagggggataaggcagcagcagcgactacatgcagttaacttcagaggtcttatcacagctatggatgtagctgctgctagaggacacttggacgtgttggacgctctgaaaccgtggccagccgatattaccagggcgttcactgcggcggcggctcgtggaattgttcatgtgttggagatgtttagcgaatactgtgatgcgaacgatggatgcaattttcgggccacgacggctttgaaggaggccgcagagcgcggtgatactaccatgatcgggtacttgttaccgagatgtggccaggatggctgtggtccagctcatgttgtcgaggtttgctgttgacgcctaaatgatagcccaagcggtgaaagatggtgctgacaatagccgctatgatgtggttgaagtcttgctcgaatggtgccgcgaaggcctaaacgaaatggagcgccaaaggctcgatctatttctttacggttcaacgcaaatgcagcgattaagggcgatgtcaggatgattgagctgcttgccgagcactgttcgtcgtgtgtgttcgagtgtggcctggagcaagccgcaaactctaccgcaagtcgtgagatggtgcagctgcttcttgatctttgtgtcgcgaaaagttcaagtccgatactactgagtagtgccgtgggcagggccctgttggctgccgcggagaacaaccgcatcgatttggtccaaatattcgcggggagaagtgaaatccgctccaagtggaatgcgctggttaaagcagcagcagaagagcagattgagctgatcgaggctctagcggggtggtttgatgagatatcgatcgcggaagcgctggccagactcccgcgcgatgtgaacgtcgccgtctcgtgactccagcttctacaaacgaatgtttttggatgctgccacccgtggattctccgctttggttgaataagaaatggacatggaacgcatccgatgggcctttatgaacgctgcgtcgaatggtcataatgatggaaacagcggcgagaaatggtcaggtggacgtcgtccggctgggaagaattttaaatgggtcttatgctgaacaggtcttggatttgatcataccgtactttttctttgatccagtgattggatcacatttgtttgtgaactgaggccctcaagtcctgcctcactctgctacgctagcttcagtggaggaatgtccagcaccctacggctccgtgattccgagccttcaagcgcaagccaaactagcaccgccatggactgagcctcctcgcgtcactgctgcgctgagcacgttagggaccccgagcgtctacttcagcgtgaaggctgtgctacgtctcctatccaacgcgcacgagggggccaaccctgaggtggctcggatgcttcgacatgatcatgcccttgtggagcaagaagatctacgtgcgcggcgcggcgtggtgcttctggtggacaaggataccgacagcgacggcgtgctgggccagacacaaggcctgcacgataataggcgacgagcgacgacgatgtcgatgcggtgtacatgttgtaggcaaggtccagatctccggtgtgtcgaagagaagcgaggcacgagaagcggctgcagattatggtatggccgttcaacacggcagcgggacggatgtggccagcggaacagtgctggtgttgtgtttcgcgcagcacagcgctggcaacgtgtcaagggttggcatacaggcgagcgggccgtctacagatgaaaacttcaaggcagttgacaccgcgcggtgagcagccacgtcctcatggctgcagcatcagcaatgtgaccaacagtgacgtgtttggcggcatgggtgtgagcaccggtggtgtgggcggatgcgtcggtagtgtagacatctcggagcgagtgtaatagggacggcgctggaatttcctgagcgccgaagcaagtcaagctcacgtttatttttgcggcaacaggctgaattggaaaccataccgatcgagatgcgcaagcaatcagttctggcgattgaagcgcttcagttgagtcggacggaatagaacggaaaacaaatgatcaactacttcggttatattttagacttttaaacgcagtttctacagctacctgtttgaaggggttaaggactacttcttgctctaggaagtagtatatcgttttctatcagtacgaagcacatgccccagcatgctgaagcacacgtccagtatggtcaaaggatacgtattcgcttcttgcagccgcaaactatcggcaacaaactcaatggaaaactaatgcgaataacatatttgcaagtacttagttagatgccagcaatgatgatcgaccgaggtgagccagcgttgagctgctgcattggtttgctaaaaatgagtagtactgcactctttagaaaacgtgtaagtccatcgtctttattaattggactgagcaaacgccttccgtcgtggcttaggtagccaccatctcaccacggtacaatgtgaagcgactaatgcaatgataggctccgcttattgcacaatgccttctcatttaaagcagtgggtccaaatgctcagccttcatgtacaagtagcattatggatgcttgctagagcaggaaagccgaacggagctcgtacaaatggtgacaagtagtaccatgttccactactgtggctgtttggttcaggtctaccgattcggtctcataatcagcatgttcaaatcctagacctgatctgcataagaatcaaaataaaggcagccgtccggctgctccgtgggagatgtggcacagcatgcattcacagtgcgttggtgaccgcagaaacgcgaggaagcgctgaaattgtgcaactactgacttccaaaaagcctcggctgggatgaagaagcggtctgcagtcaactaactgtgcggtctgtagcgagtagggcgtctttaattcgtgcgttgaattttttttttaccccctttgaattcaacacgttggtcgttcgtagattgcgttcgcttccatcaacctcaactatactcccgtccatcactcaactcggccaaaacgccttacttcacttttcttttggcaacggcaacacggccccctcttcgcgaacaacgcctccaccactaagtagtgtcttacatgctgtgccgcagaacgttcaagccatcccccacatcctcgactccatcaatgggaaaagctagggagcaccgaaagcggagcaccggagcagagaaagcccaggcatacgatggcagtaacaccacatgaatgattcaacttcaacttgactaacctaagacttcaatgctcagtgcgaggtatttacggatgcgcactcctccgcccagatctatgggattcttagcggatatagatatcgatcattttagatttggaggcaaccaacgccttggacttagaatgcatccacgcacacctcgccacaacataaaccacttcatcttgtcgctaccactaccactagaagccatggctacaggcgtgccgcgaacctaccctccaccactgctagaagccatgactacagacgcaccacgaacgtttatcctcggtcctccacccccgctcgaatatccgtctgaaagagacgtagaggctgctattcatgcgtggacccgcgctcacgggtacaatgtctctcgagtatagcaagagaagaacgccaacggagaagttcgctatcgactgttcgagtgtgatcaatccggaaaacacaagaacacaagaaagattgaccctgccgatcgaaagcgacggacgagccgcgggtttgcgtaagctgagcgctgaaatgggggagatacctcgatacgcagtggtggccccacaagaagaagttcgtgagatgctggacggataaattcagccacttcggctgccgacatacctccactgttgaaggaacgcacgcaacaatgaaggggtggctcgagaattctcgaggggacttgctgaaggtttttcaggacctgattccatggtggcttacagcggcatcaagaaacagtcttcaggcggcgaatgacgccggacggattccaattgtattacggggggttgaacgatattctacaatcgtcaaaataatcagtgtctgggcaatcacggagacgaacgccttatgggcgaaggttcataaaattgttgttcatgggctagaaagaagtacgtgcgcggggacatttcgaagaatccacggccgtccatgcctgcatgagcccatgcttatcatcgactctgagggtctgctaaagctggagccacagcactttgaccgtcactagtggctgccgtcggttctcaagggtgcgcctccacgcatcatagagcctgtctccctccgcagtggacgacaacacacccaacataaccccccactgagtcggatacggcatgcccagtacacgccgcgagccttccagctttgaaatcattgagcaaaacctggcagccgcaacaagcaccccagcgcaacttccgtccttccaagcccttctcgactgtgatgacaccgagttccagcaggtattctgcccaccccgtacgtggggttatgccggactacgagcactaggcgaataagtgcttcgacatttgaagtgcactttgatttgcattctaaaatatatgtatcttcatctcgatcttgtgttgaagttaaatcattcatgtggtgttactgccatcgtatgcctgggctttctctgccctggtgctccgctttcggtgctccctagcttttcccctccatcaatgcgtgtctcctcccgcaaaccgtcgacgcagccgtctacaacgacctgcagggcgtgctgcacacgtttggagcgattctcctgttgacattccacgcgatggacggtgccgctgcaagaggacggcttgacatcgtccacaggcgttttgctaccagattggagggctgctcagctgaggctttcgccagggctgcagccaacagccacttagcggtgctccggtggctaatacaccgctacccaggtcgctacaacagatcgcgttgattagttgcagcagccgaacatgggcacgttgacgtggttaagtggacaagccaacagcgtaggggtgtatttacgccgcgcgatttcgtagctccggcgatggaggatgcagcgactaatggatccgtggaggtgctgattgctctcaagccgtggccgatccgtctgaccggagctttcactgctgctgcggctcatggacaaattcacgtattggaaatgttctttgatcaccaaagggtgaacaatatgcactattttggtgtctcggcagcgttggaggaggctgcagagcgtgggaattgtgctgccatctagttcctgataccgagatgtgacaaagttgagattggctgggccctacgtgcggcagcgcgagttggtcaaagcaatgcagtccagctaatactgtcgacgtctgagttgaatggatccagaattgtgtgcgccctggaggcaggcgccaataatagccactatgacgcggttgagatattgctcgagctcgagctgtggactcgcccagatgcaggccaatcctcatcagaattcagggcactgccccgcgagatggtgctacgcagcacattagtagcggccgtaactagaggcgatatcaggatggctggtctgcttgtcaagtgctgctcgtcatcttcgattcaagccgcgttgccgggcgcagtagaaacaaatgggacctcgaacatggtgaagctgcttcttgatgcgagcactgcgaaaggcaccgacaattcagaacatggttatctcgtaggcttggccgctgaaaaggctgtctctcgtggtgattttgaaatcgtaaagctgcttcttgatagaggcaatgaaactgatgcaggccgtgcgctgagaactgcagtgaacatcaaccatgttgattttgtaaaactttgcgccaaacatacgtgtcgttttgatacaatcgaagccccggatcaagcagcgagaggtgggcagtttgaaatactcgaggctctgatggagtgccttgaccaagcatcgaacgctcgatcgttgctaaatctcccgtttgatattaggggcggcgtgttagaagcgatgttgaacaggtgtggaccaaacatgtacgcccagattttcgcgagagctgcttcgttggtttggtcaaaatgttcaaggaaaacatgaatgcaaagagtatcaactcggcactcaggaatgctgtgctgactggtcatggtgtgttttccgctggtgtgcggaagagatgttttctggaatggtgctactgactacgtgcgactgagcaccttcaaatacccgaggagtttcaagtgaccaagctagagtaggcactagatagatacgaccggtgggggcggccattcgcgaatttgcgctcaagccgaccagttcaaacttctaagtttaacattccagccactccgattgcccctccgccgacgcttcagtccgtgaagtacgtgctgctgctccctgaactcctcgatcaaggcattcaagaaccgcattacgccaaggtcactcgtcgaatgcggtctggcgtcacgctgtgtgccgttggaagtgagcgcgggcgcaagtggaaaatcaccatcgagcaggcgctggcttgggcagtttcagaagacgaagtcgagacgaacccttctccactcatccactctcctgtggtgattatcaacgatgtccacttcatccatggtcaagtggctgcgtgcgacggcgatggagctgtggtaaacacggttgggggaattcatcgtgtaccccaatccagtgtcgtcagatcggcccccgtcgtcactattctgcttcgaaacctgtcgtttgccgcagaaatttggggcctacccgaaatcgctgacctccatcagaagctattagatcgcatactgcgcaccaacggcgccaccgcttccaacgacgtccagcaaataatgcacggtatcatcgacgatgccatgagaccctcggcagatgagattgtgacgtggatcaacccactgtctggacaggaagttgcttttcctgttcaacatgccgtcgattatgctttctacaatgatgccggaatggagccaactccagattcggtagggacctcattctgcacacctccgacagcatccaaccagcgtcaggtggccgaaactacaaggacggcacgcaggatctccctccttaaccccagtagagtctccacccgtacggaagcaagtgccatgttcgacacacaagacgatgatgacgacgttcttgaagaaattaaagtcggcacttcgacggatggacccaatcacgaggtgcagcagtttgtgcctcctccaagcaaacgagctggaacgacactgtctgtcgcacagcagcaacacagtggagagattctagctgccctcgcgtcccagccccgcctgcagcgtatcttcgcggagaactatctacccgactcctcagttgtaggaagaacatccacgcaggcaccaactacttctacgacaaccctaggatcaagtggcatgcgattgaactcagaacaaggtgaagcagcgctgcatttcaatgtcagcaacgcaagtgttcctactttatcacagatccaggttcatgaagcggtcgctgcaccgcaccatcaaggtacgacattagaagaatatgtggatggaatgattgcttcggagtattgcttgtttaaacccttgcccggggtgtctacgcgagtccgtgatattcagttcggcaagcgaggactgtcggtgatgcacttccagcctctcgcatttgatgataaagtggcatggtacatgaatggatgatctaactttcagaatctgagttatttgacggcgattcccaaagccccggaaccaaaggatgttcatgaagtggtggctgcgtgtcaaacactggagctttttgctagcgactacttctctgccgacctgaaggcttctatcacggcgctagttgcgctagttacaggtctcgcgcggtcgcacgtgtgggaggccgacgacctaccgcttctcctctattggatcaacgtcacgctggaggagtatcgaacgcaaataagccaagcaacgtaggtacctggtgaattcaagaaaacgtttttggtggagaacagcagccttggacatatcctacaaacagtgtcttcccgacagctaatcacgcagtcgagtcgggctccaaagcgcggtcaagaacagctcaacaatgattctgcagccaagcaggtcgccccattgacgaacgatctggagaagcaaattccgcaacaagaaggcacacaactatgccttcgatattgtgggttctactcaaaatttccgaaccggccgattgcaattgcccgagccaaatcgctccccaatcgccccggccgcttggattgtctattggaactcaattaagtacgatttacatatggcattcttgtttggagcggtttcgatctgaacttgaatttgtattggtcgattttcgaaatcggcccgatttggaaattttcaacggaattgacaatacctgtcggtgaaaggctgccgctcaacgccaaccgtcccatgtttttcgggaagagcccacttcgatcctgagtcgctgcaccctcgacttaaggctctgaacaagaaacgatttggcgggctcaaggccaagtactcgtcgctctgaagaggcccgggcgatcattgggcagggtcgtcgggcagacagctgcgatacaccgtgcctacgcagacgcaaaatgaagctatacaactggcgtcgagctccgtcaaagtatacatgaagagccagctactgggtcagccttcgcatccccagacatacccgctggttcctccgtcaaatatggcaggtttttccaagagccagctgctctccgaacctccaagatcggatctcaacacgctggtccctccaccggtcaacgccgtggcaggtcaacctttcacgtcgccttctacaacacaccatcatgcagcagactattggcagttcaaactatccaaattcagcgaagaatttattcgcagtgccttgaatctgatctgctccatgaagaagtcgtgataagtacccatttacaccgtcaaggttttcgtcgagatcgttctcccaccggcttggataccttggcacaacgcacgctgactgcgatttgtcaagcacaacgacttgacgtggcgtcagctgcgagccttgtacgttgtgaacgccctacagacccacgaccaaacaaagccatgcgtccgcaagctaatgcgtcgctactagacggctataagcatcgggatgtggtgctagcaataatggagcgcggcatcgagcctaagtggctacgccctccaccacccgctcgacccgttaagaaccacaagccttgtcaaaagcatctcttggcagtcattcgcagtattcgagacggtcaaaacaacggacgctatatgatcgtcgatgacgcattattagagcagtggtcaaatgtggtgtgcagcccccttggtgcagtcgagaaaaaagacatcgatccggccattgaagtgcgtctcatacacgacctcagttttcctgaaaatatctcgacgaatgcaagtttcgacaaaaattccgctccagagattcgataccactacatcggggccatagctgatcgaattgttagatcgcatcacgcgataccctcagtgtgtgatacgaatactgaaaggtgacgtgaagggtgcgtatcgacacctcatggtagcttcacagcatgtgcatttgtggtgagaagatccgctcaagaacggtcttgatgggactggatccgccagttcactgggtagtgggatccggcagttggtgacgatgcacagtccctctgatgacgccatggttgcgggatggaggcacggttgcgggatcaggacagttgaagttggatcaggtgcgagtggtgtggtgcatacggatccggtcatctatattaggatcccctagattaggtgcggatccgtaccagcttattgatacagtggttatgttgggataattaggcaggagagagagccagtcatggataggatccaagtcggatgggaaggctgggtattggctaacataaatcagagtcgaatttgcttgggaaccacacacttggcccttagtattgggattagtattggtccatactttaattaagtgatttgcccaccgcacacgtggcagactgctggatagcttgcccaccgcacacgtggcagactgctggatagcttagtcagcagctcgcgcccttcggccctcgcccctccagctcccccgctaatagtaggcggcaagcgacgtaaaggaaaaggatacaacacccccaacaaggcagcaactccggatccggtatatttcttatcggatccacaagatctacggccaagaccaaggatcaacctacccagacccgcgcgaaggaacccccactgcggatctaccccaacatctccccaagtccccgccagggacattcaagttcacccgctgcgcatcttgtgtcaacgagagagcagaaccaacccgccgacgggtacacaaggtgagccactcagcaacctacggttatcggagtaccccctccgttagtcggtgtctgggcgcagtgtgtgagtgtgggatccctgccaattccaccggatccactccaccacaatggtgcgcgtgcccggatctcttggcgacgcgggatttcaccgtgagtcccaagatgatgcgcatgtgagcaacgaatcaggaaatgaagcgccgacggagctaggatcaccggcggcgtcgctgaagaatggatcctcgaaccaacaaagtgccaggaggatctctaccggcggatcggaggcggatcgggatgaccctgatctcgaggagaagcctctaccccctccacaggtcctcccgaggacccccgcgggtcgcgctgcgaagcacgacccgccggacgagcacccagcagcgaaagctgttggatcctcggccaaaaaccccgcgcagaccaagggagccatgtctaagaagaagacacgagcagcgcgaaagaaactaagagctccggatgcggagccggaagatcgtagcatgaccaaggcgacatggacgcaatccaagctggaagtggcctaccggcggatcgtgctgcaagacttcctacgcgaccaccccgtgatgcagatcttgcagctacaggtaccggaaggactcactggaccgatacaggccccgtccctaacgatgaacaagctggaggctgccacaggcctgctgcgcctggcgcaggaggcgggtctcgccgtcggtgtctttgaggcgaaagacctcttcggtttagagctggataccatccgactcgcggcggccgcgctgttcaacaagctgaaaccgatcgtaggcgagaaggaggcattagaaccgatccagcctaattacgcgaagggggccaaccaccaacgccagagtaccatacgggatcttccacctacgagtcggccacgtcggaagtaggatcggacagctcgaccgaaccgaagcgcatgccgctgggcccagcaggcaccgagctgctacggaaccggtcagcagctgcagcaccacaggcgaaaactacatggccggctcgggccccgacaagcccgacagctaggtcgcccgaggtagcccccccccgcgcagtcgtcgagtgcgttggcaagattcttccagtcagcgatggatcaattcctacaagaacggagtctcacttcagtcccaaaaacggacccaaccacggcgaagcgaaggaggcagatcccagcttacctacgaacacaggacgtggacatggagtcggtaggatctcacgatcatcccgagaactgggagtatgacccggacgacgtgggagcagtgggcacccggaggctagctgcagcctctacagctgcatcaacgacaccgctagccggaacagccacgatccagcgggttaggatctcggctatctcagacctgaaggatttcactgggaaggaccacgacgaagaacgcgcacgagcctggatcaacaaagtcaagtcagccttcacgagggaccaagcgtcggatgaggagaagtgcctcaccttcgcggatctcctcacaggcccggccagaaactggtatcgacaactgagccggtcgacgcgaacgaaatgggcagacttggcgaaggaatttcagtcacagtattgtcgattgggggtgtcagtagcgtggcagtactaccacgcgcgtaagcgcggggacgaacctccgctggagtatctacatcggttgaatgtagcgggcatgcgcgcccgcgttaggatcaacgacggggattccaaggctcgtcgcgagcacgtggagcacttcatcgaaatcttaggagactctgagtttgcagaccagctgaccctgttacggttgagggacgcagaagagctggaggtagtgctacgaccgcgagagcgatcgaagtctagacacaagaagccggcaggaggcagcaagttccgaccgaagccagcagcgatgccgcagccgtcggcacccgcgcgagcggtacgaacaatgcatctaccagtgtcggacagtgagtctgacacagacgagtcaggatcggagggagagctacaccgagcatacgtggccgcgacaagaggatcgtaatcggcggagatcacgactatgactggcgaaagcgcgacgtcgcctgtttccgcctcaccgcccatagaccccggcgcacaagatcgccggcctcgttttccgaatgacgggcaacgctgctcgcattgcggatcgagaatgcattcagacctgggctgctggaaacgtctcacatgccagaagtgcggcaagaaggggcatccgtccgactgatacttcttcgtgtgtcgcgggtgcggcgagctccatgatcacggcaagtgtcagatggaagaattctacaacttgatccggcagtggttcgatcccagcaaacacccgggacttctgcctgaagcggcggaaaaggtgttaaactagagcgctcgccgggtttgactccggtacgagacgagcgttctacgttctgcatctatgcatttgtggacaagcaaccgagacacccaggaacggtcgcaagatcggggccctctgataatatacgtgatcatgaaagaaagcgtgttgcctctgttgcgagtctgcgtgcacccgatgaataaatgaggtcggaagtgcctatgaccctggatctgatgcctggagagtcgagagggtactggaagtattacgtacccggaaaacacttcaagcaagccaaggtcagcagcaggatcaacaataccaaggccgtagtcatgcttgactctggatccgaggtgtcgattatcgacaccacctttgctcgtgaggtaggatgttatgtacatacaagtcagcgtcaagagtgtctcggcataggagagaagctgtacgtggcgactgggagaacaaggattaagctcacgttagtcggaaacctggtgtactattacgacgtgtgggtgggcgacgatctgccaccagactatcaagcaatccagggcatggatttcatggtaccagccgggatccgcctagatctcggagacggatcgatgtgcctaccggacgagatccggatccagctacatggacggcgacagatcttcagtgaccgggcgcgggcgatgacgattggtcaatgggtgtcgttagcagcgggcgagacggtcgagctaccgcaacgcatacaactcgctgactccgaacaactatggctcacaagaggcaagtagtgggtacgtacgttggccgctggactggggaagacgcgatacttgcagatcaccaacattggagaaacgccggtctgcctacaacaccacgatcaggtgggcatgtggttaactggggatcacgatcctcgcaaaccgggtttcgtgtccgtcgggtcgagaaggtataccgagtggcagaacctggcgtatagcgccacgactgacaggcggcccgatccagccccagaatcaccagagacggcggtccctaagtctgtgtacctgacgcccaaagcgataatgagtcggccggaaaagattgctggtggccgactgatcgccacgcgtgtgtctgcgccgcagttggaacagagcccagccgactcggatcaggcgctaggggcggaagcggagacaaggataaccgaaacgggaaacaggtaggaagaaaaggcccctgaggtagccgggacacaggatacgctaggcccccaaggccaggagatcctaaggtcagctgagcagagacaagaggcgtcgccgaagaaatcagggaccgcgcccgcggacgtggatcgggaggatgggtcgaccgcgactcaccttgaagatgcggagctcatccccatggccgcgagatgtgcagaagaacaaccagcctctatccaagtcggcggatccctactaccgtcttgccatcagccagagccaatagacaaaaaggcgcaggtacacatggcgacgcggcggaagacccggaggctcatgccgaagaagatgcccccgccgaggcgccggcggagcagcagggaacgacccaaggatcaagcgacaactcgaagacggagccagcggatgcggagattgaaagtcagactccccagaggagacgtacgagcgcagggcgagtgctttgtacgcagaggactacgagggaaagctggcggtgctgcccgaagtgacggtcactacggcagaggtcaaggtggaagatctgcatgtaggcgacgctgaagcgaactccccagaagagatccaaaacctcatcgatgagatctgggcgtacaagcatctcctcatcgacaaagggaacgctctacctccggccgccgtcggcgcagtctgcgatatcgacgttggagatgcgaagccggtcacacagcgtgtgcgcaaggtcgccccgcaatatcgggaaaagctcgcggatctgctcaaggggctgctctcggccaagattctcagcccctttacgtctccatgggcatcccctattgtggtcatcatcaagaagaacggagtagatattcgcctctgcatcgactatcggttggtgaacatcctaacgaggttgatgatctaccccatgcctctgatcgacgacctgttggaggatctcgacgcgacgctgtggtactgctcgttagatatggcgagcgggttttgggtggtgtcgatgactgagcgtgcgcgggcaatttcagccttcatcaccccgtctggcctttacgagtggaacaggatgccattcggattgaagaacgcgccccagatctaccaaagattgatcgacaacgcattgtatggtttcctccggatcccgccagcttcgaaaggagaagatctcgtcgatctcttcagagagggcgagcctaatgatgggggagagccgtctgcgctggtacattgatgacatcttggtgacagctacgtcgtgggatcacctgtgtgaacgagtgcggaaacggctggaagcgtgcaacgagtggaacctaccgatcagtgtagccaagagtttttggggcctcaagaaggtggattacctcggtcaccgagtgtccgctgggggcctggaggcacaaccgaaggatctgcaagctctaaccgatctgccgttcccgaagtccctccgagcaacgcagtcgttccttggaagcttgaattactacggccgcttcatcgagaacctggctgtatatgcggcgatactgtacgagctacgagaggtcgacttcgcagagctgaggcagcggtcaacggaggagcaacccaacaacgacgatgttaagaaggaggatcgtagtacgaagtgaagcagagccgagacagccttcgccgcactgaagggcaagatagcggccacgtcgatcctgcgccatttcgatgcggaaagggagccggtagtgatcgtctatgcaagcgagtgggcgatcgccgcgtcacttatgcaagaacacgacggcgtatacatgccggtgatgttcgtcagccggacattgaagcagaacgagctgaagtatggcatcgcggagaaggaagtattgacgatcctaaggatgttggatctcggctattcgatgctggtgggaagacggatccgggtgttaactcgccactccacgctggcctggttgttcaggtcgacggggctgcaaggcagcctgagccaatgggctacgttgttgtcgacatggatgatcgaaattgagcgatgcgccaagggcgaggacgagatcctaggggcgctagcagcttgcatcacccctagagagaagatggatgaggcactagcagcaatcgcccccaggaaggaaccacggaaggtgatatccatgccagtccctacagtggagcttgaggaagagttatgggtggcaagtttcgatggatccgccagagtgaaaaggggtgggggagccttcagtgcgatcgtgtgaaagttgcccgagtggacggtagtcgccgcagcatcgagatatgcggccgacatgaccgtgaatgaggcggaatatcatggactgctactctgcttcaaattgctacaagggctagagctgcgacgtctgatagtatgcggtgactccaacctggtgatccgtcagatgcgtggggagattgactgcaaagcgccgagtctcatgctttcgaggcagaaggcactagaatgtctgcgcaagtggccgacccacgacctgttacacgtgaagagagcatggaacgcgagtgcggacagtttggccggcgccgctctacaacgggaagaagggagaactgtggagacagacgcggaagcggaagacttgatcacgctgaaccgactggaggaagtgctgatgccggctacagcgggtgacgtggtccaagttgatgctatgcacactcgatccagtgccggaaggaatgcgaaggcgaaggtgttggaagaggaagtggtgcaacagttacgtgtagaacggatccgccaggcccaggaagaagaggcatggatccagcagctgaagcaatacttacaagggaatgtacaggcaatgtcgcaggcggaggcaaaggcttgcagcctgttagcggcagacttcgaaacggatacccaagggctgctgtactattgcgcgccgtcggcaagaacagaggcggaccgggacggcctgcttcgactagtcgtgccggaatctctacaacctgacctactccaccactaccatgtgagcctggaaggggagcaccaagggatcagtcggacctatcaacggatcaaacctcacttcttctggagggggatgtttaggtcggtgcagcagtttgtcggtgaatgtgtcgactgcgagacaggcaaggggcgaccgacgatccgaggaaggtccccagggaacatccgagcgacgtatccgttccaggtgatcgcgatggatcataccccgtcgctcccgaagtcaaagaagggcaacaccgaactactcatctgggtggatctgttcacaggctatgtggtggcgaaggccagtggatcgcgtactgcgcagacgattgctgagtcttacaaggagtgtgttttccgccgcttcggtgcgagcgaggtgatccgtcacgatcgtgagcccgggtttatgtcggatttctttcgcgccttcaaccgcatcttaggtcagcgccagcgggccactatggcctaccggccacaatcaaatggaaccgcggagcgaatggtgcagactatcacgagggctatcaagatgtatgtccaagatgaagatcagcgcgacggggatgagtacgcggaacggctaatgttcgcactgaacacggctcatgaccggatcaggggcgatacgcctttttatctagcgcatggttgggatcctacgactactttggaagcaacgttgcccgtaggcagcaccaagagacgagactcgaatccccgccgctggcggtacaggatccagaagttctaccaacttgccaggcaagaggtgaacgagaagttgaagaaggcaatcgctgaaagggcggaagcgcgaaacgagcaggctacaccccaccatattaaagctggatcacgcgtatcgctctatctggatggagtgaaggagggctatgccaagaagctcgcgcacatgtggcacgggcctttccgagtgctagagatggtgaacgagtatacggtgcggttggaaactgcagggactgagtaccacctctttccggtggtacatattgccaaacggaagctgatgagagagtttcccgaacgcccgcggatccagttaactgttgacgaggccgatcgagtagacttcgatgaagccctgctgccagaagacagctgggatcgagagctgggagaagacgagtttgaagtggagcagatcttggacgtgaggactggacgaaagacgcgctatggacgtacgttgcgcgaatttcagatcaggtggaaaggatacgaagagctctcgtgggtggatgaggcggacttgaactgcggcgcgctgatccacgactttctgaccgcccatgcgaaacggaatcgattccaagccatgtagtcacacgaggaagagtgacggaggcagccacgcaggtgggctgggcaccgacgtgaagatcaaagtgaaggatctgcaggacggctgcagcatcaaggaggaagggcgctctcagacgggcaggccgtcatgagataaaactagcggagaaagatgggcagggaggctgcatttctgtggaagacttggggtacatgtatatgtgatgaacaagtgaacggaatgacgactgatgaaatggatctggattgtggacgaaaagatgaggaggactgcgagtgatgaaactgaagttgaattaagacatgcagtcaaaacgactagccaccttacaccgctaccaaacacgcttgaactagacgccagagggagaagtcccgcggaatcgctgcaccaccactaggcacgagagaattttaggcgaaggcggtcaatgcggagtgcagggtgcgagccggcagaggtgcggaagtggttacgccatgggtcagcgcggtcgcagtcggccagagcgtccaccagatctgcgggtgccgcacgccccgctgcaatggcctctccaccagtgaaccacgtggtgtcctcactctgctgggggaagcgggcgaacatgggatccagccaaagatccagatcgcaacaaccggtacgccgagccttctcgaagccctgctcctgccgatcccggtacttctcccggacatgagagctgcggttcttgcggctcgtgtaaaacgaggcaaaccagggatcggacctcttcaacgccttcgggatggggaaaggatgggtggactcccagatcgcctgcaagcagtcgctctcgaagtccatgtaaccatccacgatactcagcagctgaggcgaaacatccaaatcgaaggtgtgaggggcgggcctggtggacaatgcctgccgaggctcttcggcatacaagccttccacattgacgcgcgagatcaactcgggtgtatacagcgctcgatccagagtgccaccccgcccaacgcgctcaggaaacatccagcccacgctcagcacttgatagtcgatcaccacacggggcgtggcggtgtcatggttaacacggcgatccgagacggctcccaagggtcgacctcctctgtagaaaccgcacgttgctgccggagaccaggcacaaaggatccgagtggcccgaaaggaataagcatatcaccaacaaccccagcgtgtgcggccccatcagtcgtagcagatcccaccgtgagctggcccccagtcccaggaccctcaccgcgcagcgctgcagataaggatactcctgtggaggaatcgtcgagatccactgtgctggtatcttcatcaatgccgcctgaaagttccacggcgtctgcattctccacgacgatcggagcggccgcagaaccctcagaagccgaggaaacaccggatctggccaaactcttagagtcgcgacggcggaagtcggagcggaaacgagcctgggctacgcgcagcccgtcgtcgtcagactcgtcggagtcagagtattgggctcggtgcccgtgttggagcaggcgtaatcatcatccacctcgtcaccagccggatccacggctgaaacaatgttagacaaggtggcccccgcaggcgtcacctcgatcacatggtagaagcggcggggagccgacccgccagcgacgacacacgacgaacacgcttcgcggccggagcggccacgagaccaggctcgatggcgggcagacgggctcgcttggaggaagaaggaacgcaggcggttggagacggaacactcgggacttggaccccagcgacgcgaggaggtaccaacacggccaaagccgccacctgcgcgatacgctccagcgcggaggtgtgatcctccgacaaggtatggtagatctcccccaggtcaccatgttcggcttccagagagccgaagtccacctccaggccgtcgaagtcgcggcaaggtggccgtacgcttgctggatgtcggcgatctgcacaagcagctccctgcagccacgcacacaggaagcgtgagcgggatcggccggatctggggcggaagaagtagtggcaggcggaggagtcgacgcagggggccgggcaggggtaagcgcctcgcgcgaggccctcagctcgccctggaggacctgtttctctgcctgcagactgttcggagcggctatgctcacacgcaactcctcacgaagagcgtccctctcgctgcggaggtgtgcgaaggtgtcgatccgcgcgttggcctgtgtgagccgctcctgggaccgacggaaattggtggcgacggtctggtactcgcgagcatgctgatcccgctcgcgccgaagctggtccaactgcccctctacgtcgtggacccgctccagcgtagccgcattctggcgatgtgactcctggaccgcagcttgctggcggtccgccgcggcattggcccgttccacagctccgttcgcacgctcagcacggcggttggcgtcgtcgaagtcttgctgtagccggtcacgatgggcagagatgcgatcaagcaaaccctccagctcgcggatccgctcgccgcggacgtgaatctcgagatggagtccgtggacggccgaatccccacccgaaatcgtgcgtaggtcctcccgaagctgctggttggactcctccactctctgggcatgcgtcaacagatccccgagacgagacttgagtgcgtcgcactgggaacgggattcggcgagatcggcgacggttgaagcttgggcagcttgagcggagcgaattgggttgtggtgatcagcagcgtggcgcgcaagatccgcgttctcgcgacgaacttcactcaggtctcgagcgatctggaggacggatcgatccaactcgccatccatcaagcggccctcaatccgtcgctctagctgagcagcgtaatgttgaaggcggtcgtaagcttcggttgacgtctctcggagcagctcatgctcgatccggagaaccttaactggtgcagctggtccttcatgcgatccaccgaagcaatggcatcggcagcccggaagttcgcgtcgtctaacttggcttggctggcgttgtacttgcgttggacgaaggtcacgaagcggtctgcgacctctcgcatggcggtgggtgcggcgtgaagctgtccgttgtgctggcgggcaagggtatacgcgtggcgcagctcgtcaaaggcctccagcaccgtgtaatagtggttggatacggctaataacgcagccggcgtgacctcagtcgggtcgagcgacagcgcgagaggcgtgacggacaacatggggtcagaaggcgcggagtcgcagataacacatgggggcggggggtccgaagagcgaccgtatccgacggtgacagccacacgtgtccccggtgcaggagggtctgcctcatacggggcttcgggcacgtcaggacatccagtcgcaggacggcagtggcgtgtctgagccatggtgaagaagaatggtggcagaaagcggttgtgccagaactgcgggaaatcttcaattaatgatgcggatcaaaggtggcacgaggtgatgccgttgtgcagcagcgacctcgtcccaggggcgaatgtggtgagaagatccgctcaagaagggtcttgatgggactggatccgccagttgactgggtagtgggatccggcagttggtgacgatgcacagtccctctgatgacgccatggttgcgggatggaggcacggttgcgggatcaggacagttgaagttggatcaggtgcgagtggtgtggtgcatacggatccggtcatctatattaggatcccctagattaggtgcggatccgtaccagcttattgatacagtggttatgttgggataattaggcaggagggagagccagtcatggataggatccaagtcggatgggaaggctgggtattggctaacataaatcagagttgaatttgcttgggaaccacacacttggcccttagtattgggattagtattggtccatactttaattaagtgatttgcccaccgcacacgtggcagactgctggatagattagtcagcagctcgcgcccttcggccctcgccccccagctcccccgctaatcgtaggcggcaagcgacgtaaaggaaaaggatacaacacccccaacaaggcagcaactccggatccggtatattacttatcggatccacaagatctacggccaagaccaaggatcaacctacccagacccgcgcgaaggaacccccactgcggatctaccccaacatctccccaagtccccgccagggacattcaagttcacccgctgcgcatcttgtgtcaacgagagagcagaaccaacccgccgacgggtacacaaggtgagccactcagcaacctacggttatcggagtaccccctccgttagttggtgtctgggcgcagtgtgtgagtgtgggatccctgccaattccaccggatccactccaccacacattggatggcagctcgaattccagaagcaaaagccttattgatagacttgtcggcacccttcggttggtccggctcgcctcctttctacagtgcctttggtcgcgcaatcacttggctcgtacagcagaattcgccacatacagtgtcggccagtgaagacaacgaagcgttctggggatttgagtgggtcgacgatcaccttctcatcgaagttgatacggaggaccggttatagttagcagaagcaacccttcgacacgcaatgctggccattcttggccctcgtgcaatcaacgaagaatttttttcacagtgggaaacacggcttaatgcacttggcctaacgtcggatactgccaaccgcaccgtgtcgatgcccgttgacaagattgccaaggcgctgggtcgcgtgcgcaaactgaagcaatcaaaaacagtgacgaaatctgacttcctaaaacttctcgggagtttacgccacgtttgtagttgtcgtcggacttcccggccattctaccagcacctgcagtctttgtgcaatcgagctccccggcatggcgcagtaaaactttcagcaggagcaaaatccgatctcgactggttgagcgcatactgagtgtcgggcatctacaagaattaccactgtcaattttcggcagccgtgaaccgacagctcagctgcatctgtatatggacgcctgcggctgcaggtccgggaagaggccgtcgccctcgctgagctccgacatgggccttgccgtgctaaacccgtcggccaatgaatttatccaaattgctttcgactccgaagaaacaaagtggatcatggcggattcaaaatcaaacacgttttcgataaatgttagagagcacatgtgcatcgcactcgcactctggatctgggggtcaacatggacgtcgttggatccagatcgcaccgtagtcgtgaaatgctggagtgacaaccgagccgcggtggcatggagcaactcgcttgcgagcaccaacgagcttagccaggaagtcaatcgcgcgataggtctcgccgaagtattattcaacgttcgagtaattgcatcgcatctaccaggatcgacgaacatcgccgcggacgcggcatctcgggcatgggtttctcccttttcggaaatttggactaatttttcttcatcatggaaacaggttccagtgcccaaggccttgaggaagctctatcaaaccttctccaagaccttcaatcccaatcactggcccagtcgtcccgcgttaagtacgcaacaacttggcatcaatggcaggagtggtgcaacatgctcgggttctccatttggttgctacctcaaacagagttgcactcgtatcaacttgtactcttcggcgtgcactgctggaaattcgggtggaattacgagaacaaaggaaacgctacctctaccgtcgtctccaaaatcagccacatttcgtggcatcatcgtcgcgtgctcgggtactcagttgggctctcggacagacacaaactcgcgctcaacggaatgcgccgccaggacgccaaatcatcaagaaagtctccggtcacagtcgctctattacgaatcatgcacaagtcccttgacttcagccaaccccgccaccgcgttatcggggggggctgtggtcttgggggttttccttctactccgccgttccgaatatctagctgtcgggaaaaaggtttacgagttcatcctgactcgcgcagacatctcgttcaccgacaagaatggcctgtagcacatttgacaagatcacggaagttgctgttagatttcggggtgggaagaacgaccaatacaagcaaggcaccacccggtcaataggacgctcgggatccaactggctctgccccgttcacgctacatggttcttggctgaacatcaccgtgaacttcggctaccagccacagaaccgctctgcacaatcacttcgggctcaattgtacaagtccgtgacatttcgcagctaatcaaggcagcagccgtcgccgctgatgaaccgcctcagcacttcggcactcactccttacgcagtggtggggcatcggcactgttcgcagctggtgtcgacagcatagccgtgaagcaatttgggcggtggagatcggacgcgtttgagcgatacattcgcttgaataatcatcagacatcaactatggcgcgggcaatactcaatccgatgttagcagcggcaaactacaatggacaacctcctcaaaccagaggcgcagctgctaaatacatctcgttgaggtgctgccgctgtgcagcactcccccagtagcccacgacagaaatggtgtgctttccgctggagtgcggaagagaagttttctggaatggtgctactgactacgtgcgattgagcaccttcaaatacccgaggagtttcaagtgaccaagctagagtaggcactagatagataagaccggtgggggcggccattcgcgaatttgcgctcaagccgaccagttcaaacccgccacgccactcccagggcaacctcctcaaaccagaggcgctgctgctaatacatctcgttgaggtgctgccgctgtgcagcactcccccagtagcccacgacagaaaaactgagatggtgaacacgttactccattttcgaaattgcgatccggtgactattcaatggactcgaaaactagcgacgatgaagcatgaggcggatactgccccaatgcctcgtgtgaaacggggctcccgaatcatcagcagtgcatcggcgtcggcaaacgcagaagttgtgccaccactcgctggcaagaaaccacggctgaggtaaggaaagaaatcgaggcggagagggatggagtatgagtgccacagcctgccgtaaatggctcagcagtagaacccggcgcgaaagattgacttttgagttcgcatcttccggtaaatgttaattgtggtactaagactgggctataacgacacacaatgtgctggcgtcaaaggtaaccgacttggcgagctcgctatgatgactcagtcaaggcaaaaacgctggaaaagaaagaaaaccggcaaaaaaatctgcatgtatcaacatcaaacgggtattgctgtttgcagatattttggccaacgcatgcttattatctcgtcaataatctcgattttaatccagccagctcttaattaaaatctaggtctgatttatatacatcgccagtactggtctaacatgcaagcttggggctctgttttcccgaccaaaacgcttttctgcggcttggaaacgcagaaatgccattctagacgggccaaaccgaagttctgggcctaaaagcggccttcaccaaagcacaaagctaaaacagccctcgcctatctcgtgtccactcatagtaagagacaggcgtggtctattttagaggtctattttagaggacaaagtatttgcaagcggcaataacagttaatactggtttgcgggctttggctcgcggtgttcgcagttcggtcttttttttactgtattccaaaacctgcacagtagaaaactttatttactactatgtagtagcgctatgtttgccgcagatgagcgttgcatgaagacgttcttgaattttagcgcttgctcttatttttgaactgtgaaatatcatgcgtcaatttgctggatggcttgcactgctcgatctgccgtggcggatctacgtgaactcacactattgggctgctaccgcgggagtccccgtatgaggcgctgcagcagtgcgcggcgacgggcgtagtcagccgtcataaccgcaaatttcatttcattgcatgaactcatactagcgttactgctattcatggtacatactgcacagcttcaagctgccagactgagcttcggttcatgttgaatgtataatgtgtttattttctggggttattcgggctatatgtccaattttgacgcctgcaacttgattttgtagaattgctacactgattttaatgccgtttaggtctcctcacttcaaagtcgactctcaacaaacagtctgcacccaacaccattaatcaatagcgataattttgttttactcaacgacggtttatagttgctgctgctgtggcgtccgacatgtacatacagatatcgtatcttagaaatgacagccacatgcctaaactaacttagccgatacgacggcgacctacctattgctcgcttgctggcccgatacggtcgattcctcacaaattgcattgattgactcatcacccctctttattattgctgctgcctggttagcttgtcgccgaaagcgctttgagctgtaatgaatcggagtttgcgctgtactacaattgctgtacaactgtcattgctgttgtttcaaatagctctttaaccgataatgcaacataataccttatattgcattatctcaaacatccgcaggggcgcaaacgacagttctcacgaactgcggataatgggtcacaacatgattatggattgtgtaaggcagcaataataccccgttttggacaaaaaacactctgcccagcagctcttcatcaatgagtttaagtggctaaacgcggtcggtgctgctgtcagtgggagttttggtcacgagaaggttgttggtgttctactacgaaactgctaggtaaaaaaagtatctttcaattggccaaagcgacggcagggtacattccgttttgctaggctacaacgacgacgaggttagcttattcgaggtcatggaagaatagatcaactttgacaggttccagacagctaagtacaaatggttcgtaaacggaaagcgtaatgatcaggatgtgttaccgcaattactgaagcgagctcaccacagctattctttgtgctactgaatgaagcggctagttgattttttgcatcacctttttatcattgttaatatgttcacaaatatagtttatccgacaattcgcctcctacatggccgccgctccaagtacttcgattattaaaacagatcgtaaatagtgtacaaactttgagttcaatcctcaaaatcaccgcgaacacctgagcaaaactagtaaagcgttttatagcaggagtaacgtggtggatattgaccgcgaagtactgataatgcagtgcgaggctgtcgatcctttaggtaatccgactcctcgttagtaagtacatgtgtatcatcgaatgtcaagtgtttgaacggaatgcctcatacgtaaggttacgcctgttgctcatgttcatcctctcttgatgaagccggacttgctgtgccacgattttctactgaaccctcgtttgtacatctgcattcttgacttgcgtgtcaacctaggtgcaaacgttgcggtggggatacagctacctattgcatcagagtccgttttgccgcagcgaccgcactcggcaaatgtcctccaccgggttctgaggatggccgatggctgatggattcacttccacaaaccgtggacagtttcgtgtgccccttgaacccatcgggtgcgccttcaaggcgcgagcctcggctcaccattccgcaactggactgctacgcatctcttccttctcgcgccagcttcctttgtcatcagcatggaagtcatagacagcgatgtgcttttggagtcgagcagcgctgatggtccaccgtccccaacctaccggaatagcgagtacacaatgggccaagtacatgcgtttgccgaccgaatgtccgactccggcccagaattcgcgacccagcgccagaccgagctgaagatcaaagctttggatttaggtggcgacctaccactagaacgagtaaaaaactacaagggtcggatccgggtacgtatcctgccgactgaaatgctgctttacctggttcagcttgcatagctgatgtctacctgtagacatggcgtggcctccttctcttctgtgccattgttggtggcgctgccgccctcatcacgctgtcttccatgagcgaaagcgacagcgcttccacccgacaagttcgcttcgagaacaaggtggaggagaagcgcaggatcaacgacggactcacagacgacgaggtcatcatctcggacgacggacaagtgggcaaccccaagtcgtacccggacatgggctgcgagctgcccgactaccagagcaagaacgggcagattttcgccgtgtccaagaacggcacggaggtgcccgtgggtatcaagggcgtcaactggttcgggatggagacggcattggccatccccttcggactctgggagaacacagacaacggcacgtcggtctacgagatcgcggcgttcctcgctcgcaacaacttcaacagcgtgcgcctgccggtctgcatcaagaacatcctgattaacacgtccccggagaagtccctcatcaacgtcaacacgaaccgagcgctcaacatcacgtcgtacgtgtcggccatccagtcgatcgtggaggcgctcggctaccgccgtatctcggtcatgatcagcctgcacacgctggaccccaagaagtcgggcggcgcctggtacagcgaggcgctgagcgtgtccgaggacgacttcctggaggccgtcgacatcttgactaagaacctctgcagcgccaagtactggaacgtcctgggcctcgacctcaagaacgagccccacgagagctcctggggtggggacgcccccgattggcagcagggagcgacgctgatcggtaaccgcatgctggagggctgccccaactggatggcgttcgtggaaggcatcggcagctcgggcactgtcacggtggggggcaggacggccatgtactacgactggtggggtggcgggctcgagaatgctgggagagaaccccgtcgcgctcatgaccagcaacaagatggcgtgggccccgcactactacaacacgggcgtgtacccggcctggtacctctacgcagaagttggtgagacgaccgatggcggggcgttctccagctacgtcgagctgggcgacgacgacctgcgcgccaacattgaggcgactatgaacgtcatgttcggctacttgctgggtgtcgacaccaactccgctatggtcatgggcgagttcgccggtctgtacgcgaaggacgccgaccccatgaagacgaccaagcgcacgaccgacttcaccatcgaatttccttcacattcgtcatcgcagaggggtcacacgtagctgcattcattatcggtcgaccgcactggtgcttgcaccattgctagggtgaggtgcggtgggtcgttgctcgacggagcagattggagaatgagctaactctaaactaacctatgtgcagctgcagctggcggttccacgggtcgcgcgatgggggcctgatcctgtcttcgccgtgcactctctcctcgtgctgagaaaaccggatctttggccttttgccaaaagatacccagtgatgctcaaggccggttatgctggaggatacatgtggtcgctgaaccccgagagcgcctaccagtacaacccagctgatgtctacggcacgtttacagagggtttgctggaggacgactggctcacgccgaacaaggagttcctgcggggcatggccgccttggacgtcatcaaggacctgcagaagttcccgtgcttcccagaggagattgagtcgtcttcctcctcataagttagtgtgaaggttgatttgatggtcggttcgtggtaattatttagtttttcacgcaaaactatctgttttcctattgtatattgtggggatacgttagcaacttgcaattggtcattgaaaaggctcgcgaagacgttaatttacagatcaacgcgatcagcttatacaacttggggccactactacacaaactacatctgaacattatgaagttagctatcgatcatcttcacgcgaagcagttccaccacgtcgttgtgtccgctcgctgtagccacttccagagcggactccaactcatcgcggctcaactttctccacaacaagtccaccacccggatgtggccatttcgagcagcagcgcgaaccatctcggccggtggagccaagctctcgtagaactcattgagccaccagataacctcctgatgagcatgagcggctgcaccgacatatgcggcggatgaacagccttctccatgagcattttgcagcctctgcaggatgtccaaacgtcctctggctgcagctccatccatagctccgacggtgatagggaggaagggctcgtacactttcttgatgcggtggaggtcgttgtagatggcaccgtcgatcgttcccggtagaaggaggtcgctgacagactggatgacatgggggaaggcttcgaactctggcgacagtgccaacttcacgcagaggagctgcggcttctccatttgctgatttggttgtgggattggtctctagtcgatggcggcaaaacggaaagtgagttcgtcgtgatcaatgacctgctcttgtgtttatggaggttgattgcgcggcatcaagatgagcatcaaggattagttccacgttgaagtgacgtggacatcgattcgccacagtctccaccgacgtggccgacatttcactcagacctcgttgccgctcggtacgagtgcagacccaacccaccatgattgaactgctcgccacgccgtcccattcttgactctagcagcagtcacgtgaatccggccacccaacgatcatcccagcgccaagagctggccatttagcaatgatgacgatgagagggttcgtcactcatgcaaacaatgctgatcctctccaggttggtcgattgcttgtcgagttgatgccacaaatgcgtgcctgcccaggaagcgatgtgggcagtgcccactgtcgtattctcatgcatcggcactagtacgtacctgtatcatcctgatttcaaatggaaccttccattctggcgaaatcgagcagcatcttcacgatttcccactgtctccttcgttctgcatggcgtaacgcgtcggtaacactgaatccactgctgtctgccagtgctttcacaatatcgatacgcccgtgcttgacagcatctaggaatgcaacatcaatagctgcttggatttctttcgtcagacccaaacgcgcgtgcgcacgttttgcgagcagaagctggactatttcgcactggtttctttgggctgccttctttaactcacgtccgattggaacctcatcgggactgcaacgccccagaatttgctccactactgcagttcgaccgctctccaccgcagtacccaaagcgcttcgtacgccaaaatcatcacacttgtcgagcagaaactggatactattgacctgaccggcagctactgcgtctctcaatgctggaccaacataccggatctggtcgttgtagcctctatcgagcaacaatcgcaacacctctaagtgatcctttgccgccgccgcaaccaagcattgcgtcatatcgactggccatgggaaaactgcctccatcacttgaacgtggccattcgcggctgcagctacgagacacgccttgacttcacgagctctccgtcctggtagtaggaatcttaccacaccaacgtggccatattctgcagctaacacctgctccttttctgaatcacacagcatggggtaaaagttgtgaagccacttgagtacgtcgagatggccgtgtgatgctgctccaagaaaagcggcagttgaacatcctccgcagcggtgagcgtacaaccaatgcacgatatccagtcgccctcttgttgctgctccgtccatcgctgcaacagtccaaggccgagagcatccgtaggcttgaatcacacccacgaggtcattgtacacagcgctgtcgatggtcgcggggaggaggaaagtgttcacgagctcaggaatatgcacaatcgcgagcagttcagtcggcaacacgcgacacacaatccgcagcaactcggggtcgttcatgcttggcagattggggactgaacgccatgtcagaactctatcctgtgttgacgactgagcacgcgcagcttagccttatgtttatcaaatcagtacatacatacatagggacacctgctgcgtttggcgttagtgccgacgtatcgggatagttgtgatcaggcaatggcaaacaaatcctaccgccgcctcaccaccacctcccaggaagggaaaccgatcaactaggaatagtttagggtaactcacttagacgtcaaagtgccagctcccagcaggctccgaaataagtgcctaaatatacgccaccaggtcaagtacctggggccttctcttctcaaatggcaaaacaaatccttagaaaaaaaacgtcactgtcgaatttgtaaataaatcgctgaaacctagaggctggtcttgcttcacacacatttcagcgcagaccgcagcacgttttacaccagccgaggtctcttgctggccagcagctgcacgacttccgttagaccagcttcttccgcggacgctaacgcactgctaatgctttctgcatcactcagcccacgaagaagatcaacgacgtccaccttccctttcatggctgctgcttctagtgcgcacccgatagaggttgaatcgcaactgctaagcaatgagctcaccacctcagaatggccattcgacgcagaattcatgactgcacaacggatgctcttggaatccatctcagtctttaagctgtcaaccaagccacagaagccccgcgcagcagcatccgtgaaaatccttgcatgcgaagtaggtgcgcacttgcttaacattgcctgcaacatggtggtattcacatcgaacggaaggtgcctcagcgctttgaagacggacgattcgtcaagatactcgatcaacgcctccaggatatcaatctgctcgccttgtgctgctcgaaccagcgccttaactttaaagagaccatcgctttttccagcacacagtttaaccaactcgagatggttcttcttcacagcaattagcaaggcttgtccagcagcagatccattgcattcaccaagtagcagcgttgctacgtcacggtcgccacaggagatcgcttttccagcagcgtcaccaacagcgtacgaatgcgttctgtttctcgcagcgcaagtgtcgagaagcagcttcaccatgtctcgattcccgcttcgttttgctgctctccccaacgcgctttcaactgcatccgattggcagcgctcggcaaggacgccaaccatcctgacgtcgccccttgccactgctgagtgtaatgcgacgctgagagagccctcaacgttgctcttcttacgacgttcttcaaatgacatcgcagagctgctcgtttcaccacgagagaaccgttcgagcaaaggttcaactgcaccgtagctgctgttctctgccgcctccttcagtgcgcggagaacgatggtttcctccatctcgcgtgatctgagtatcagttggaccaccctcttttggtcagctcgcgctgcagcagacagcatctggccaatgtcactctcatcagtaatcggcagcaggaactcgaccgccgcacaattcccacgctccacaatctccgttagcgctgttctgaagcacaaggtgcgcgaacgtctctcactacagtaagcgtgcagaatctccagcacgtggatgtgaccatttgccgccgccgctgtgaacgctctggttacatcagtgggccacggctggagctcttccagcacgccgacgtatcccttggccgcggctgcctccataggtggaccaataaagtctctcacgtgctggtcacgccctctgtgtagcctcgttctcctcaccacgtctacctgtccatgttctgcagctacagttaggcatctcatggggtcgtagagctctgggtagtgcttcctcagccactgcagcaccttcatgtggccgtttgccgcagctccgacgaaggcttcagtggagcagccctctgatctggtagcgaagagcctcttgacagtgtccaggcggcctctggcggcagcgccatccattgcgcgcgaggtcactggcagaccatctccgaaggtggcgacgactccatgcaggtcgctgtagacggcagcgtcgatggtgcgtgggaggaggaaggagttgatggactggaagaggtgcgggacagcctggatgtcgtcaggcacagccgccgagacgcttaagagcggaggtggaagcggcggcgacggggtcatgaggaatgcgccaaaagatgaaaggagataggttcgtacgaagtacgttgcgcaacataagccgtaagaaaatgaaaggcataatttgtcatcagaagttttccggttgcctgacccgaaatgacgactccgctacttctgctgctgcagttcgcactgccgccgcacatccaagccatcccccacgtagcccagctcatcaatgacttcgccctgccgtcgaccatcgacgctgccgtgtacaacgacctgcagcgcgtgttcaaggtgtttgaggggttccgccctgatacagttggggctatggacggagctccagccatcggacgtctcgacattgttcaaagactgcaccacgagcgagacgagggctgctcggccgctacttggaagtgctggagtggctctaccggttctacccggacttgcgtcgggggctgcaggagctcacggaggccactacgcatggccacgtggacgttgtcgagttcctgctgagaatctggatcctacacgagtctgagttaaacagattgctcgtcacagcagcggccaacggccgcgttcctgttgttcgagtctttcggcggatcaccgttggtggcttgcccagaactggaaaaagcttctacatcgaatccacttttcggagtgtggcggcgacactcagtgcggacaccatgcgggcggtgctcaagagatgtcaacttcctgaaacacttggttgccgctgcagaaaacaacaacactgatttggtcaaggttttgctgggaaaatgtcctccaatgggtacaagcggcatccaacaaggtttgagaggcatccggtttacccatcctatccaagtagctgtcactagagctatgatccacgctgcagatgctggcgatctgggggtactccgagtactactcgggatcctaaccaagaaaagcgccttgtatgccggcgacatactgaaccgtgcagtagtctacgggcagcgggaagtccagaggctgttgctggaactgtgcgaggaaaagtatttgcagaacccgcgaatggcacctgtcatcacactaatgctgcaacaagccgcagcaaatgacgacttggagactttgcaacaattttttaccaagtgtggcgaggtcggccttggaaatgctttgggggcagccgtcagaaacaactctgtgagggtggccagtcttcttgtcgagaaaagtgaacgccatcgtgttgcgtgggctttatacgacgccgccaccatgggaaaggctgaaatgttgcaagctttgcttgatcactcggatcacccgacggttgagaacgttctacaacagacaatatcatcgggtgacactgagatatcgacgatgctgcaaagtaaatgcgatctcggtgcgcacaagcgaatctttcaatgtgctgccatgagtggttctgtttgcgttctacagcttttgctggatcacatggagccttgtaatatccatcgcgcttagatcagtgctgcagtgcggggtcatgctgaggttgtcgctagtttgctggacaaaagcgattcgtcggctattgcgtgcgctctggagcttgcagttgttgaaagccgattgtcagttgtggaattgttcgattcgtccagtattcacaatgctgtggcgaaagcgcaagttgtcggctatgatgaggtggtgcagctactaaactgcaagaaagcgcggcggaagtaaagcgctacgcgttaccgttgacaaatttgtcgtgcctccggcccgaagaagctctgaaatttctggttttcacaaaaaaaattggtgaagcaaaagaggaaagtgatgcacgttaggttgaaatgttcttctcctcgacacttgagcaaattcagagttcttctccaatttttcaatcgctgcaagatccatgctcagcttgtccacgaaattcgggttcctctccataacctcgtccagcttgttcacaatggacacactatcctctacacagctcttgatgacggtaccagggatttttccgaggagagtctcctctcctcctcagttgagggtgcgaaaatgttctcctccttctcatctcgtcacttggtagctctctatctttgttaacactgtgagatcgtgatggttgcttgtgtagcttattcttagcgacaatagtggcattggcactgacaacaagcgccgccaggagcaggtgaactgtctgcatgttgaattgtgtaatccggcgtgtttccactctgagaagtgctggtttgagccgaatccgaaatggactcgtcgtacggcacccctccgcaggacagtttgcctccccgtcaaccactgcggcaagacagagggtaaaatactgcggtaacttgcacagtgtcgctggcggtcacacttttgttcttgcatttgtacttgccggttgtccgcgccattgacgtgtatttttaaatacagcccgtgatctcacgcatttttaaatgcgtgagatcacgggctgctcctgaccaacagcaccactgatcagccgcaccggtagctacggcccccgttgtgtcgtatctgatagccaactgatcatgcagcggctgtagattaccggggtggctgcggtaatctatttttctatcgtcaaattctgatcggtaaacgcaaattttcgacttaggtcgctcgaatgtagctatttggggtgctccacacaacctgccgccacaggtaacactcacctaaaatatcaccttacgcggggtatgtgtattcttgtactccactgtacagcagtttgacttgctgccgaatttgttcagggatacaccctaccggagctcaaataccagacgcccgattttgctcaaaaaacgaatcgacaccggacgcccagatgtatttatcaaaattactaaactgagcactccacctcaagtctctcaaggccgaatctcaccaatgcggctgccgactagcagacaggtctctagcagagcgcaggctggatcctgctgcgtaggtggccttgcagacgaacactaaacgagtatctcgtgtcacttagctcaacaggaaccaaaaccagaatgctttcattgttctctttctcctaccgcatactcccacatgcaacgtgtcgtacacgaggagggaaagctgtcggacatgcactacagcaacttcaacagtaaaaaaaaatctttggtctgtcgcgtcccaactaacggcgcgcagatcttcttgtctcgcgtccgacttggctccagcatgagtgaacctcgcagcattcatcaactcgcaatgtagccatcggtgtcagcccattcctgctactcccacctcactcattgctggaccgggattgctactgacacgtcttcaacgtttagcgcttgacgcagactctggaacccattaattcccaacgccttcgtgaagatatcggcaacattgtccccacacgggacatactgcaactcgatcttgccactctccacgaactcggtgatttgacgactcttcttcgcgaatcgcttcatcttcttgtagttaccaggctccgagatcaccttgatagtgctttggttgtccatataaagcgtagagcacggcagggcttgaccgtaaatttctttcatcatcttctgtgcccagatcaagtccccaacacacatgcttgcagctaaaagctcggaaccgcatgtggcagtggccaccttgtcctgctgtttactcttgaacaggaatggacacccgttcaatcgcagtagatagccagtaaccgaccgactcgtatccggacaattagcgtggtcagcatcgcaaaatgcatcgatctgcagtggttgcactacactttctttccggtacaccaagccatacgtccgtgtaccacgaaggtaacgcaagcctcgctttgcgcacatgtagttcgccttggtgtacgcgctgctgtactttgagagactccgtactgcattggccaagtcaggccgtgtgcaaccaaccagatattgcaatgctcccaccaattctcggaacgggatgttcggatcgttaatcttactctcgtccgtctccacgggaggtaactgttcattctgcatcaacggcgaacccaccggatgcgcatcactcatgccaaagcgctccagtacccgatcaatgtaggccgtctgggaaatacacaacactttaccaggaatatagttcacttccatggaacggatgtgcttaacgctcccagattcttgagcgcgaacttgccactcaactcctcaattacttcctcgatgtcctccgtcttgccggcgatcagcaagtcatcaacgtacaccgtcaggtacaccacgcgtccgtccttccatctctggtacaaacccacatcaaagtcacactgcgtgaaaccaatctccagtaaaaactcatgcagcgtttgataccagagcctggacgcttgtttcatgccgtacagtccttttaggagctcacacactcgatccgtgccatcgtggaagtagtctggctgctccatgaatattttaacgccacgcagccctccattcaagaatgccgtaatgaagtctacgtggtaacagtccagatcatgcagaaacgccagaatgagcagccgccgcactgtctcaattcgcatcactggagagtatgtctccatgtaatcgacaccatacttttgtccacagcctctcacagccaatcgagccttaagccgatccacttttcctctttcgttgagcttcggtctcagcacccatgtggacttcagtatattgcacggttgctttggcctctcaaccagtctccaggtgccgttcaatttgtgcgcatccatctccaattgcatagcttgccaccatttgtcacgcatcggagagttcaacgcgtcttcaacggaagtcggattgcctgcacagtattcgagcgcctcaaatgtagccataaagtagtcaaataggcgtacattggcttgccgcttacgttgcgatcgtcgcaaaccgcgctgtctcttagagctgcgtcgtggctgacttcctgcatgaggacgtgcctctttgtgcctctcactccatggtctaagatcatcggcagtcggcatcggactcacgtaggctttatcctcttctgactcattgcattccgtgtcttcagctccaaccgaatcactgccgccggctagagatgcatgccagaggtcgaaaaaaatatttcaattcaataaataattgggttttgcaataaaaatctttattattggacatcccagctaccaatacaatatgatattgacccaattattgacaataaatatgaaaaagtgcggttctgcggcccaccacaaacctacgtttgatggcatcacatggcaccaccgatgacatcaacaatggggtcctccacactacactagcgtcgatacaattactggtcaggagcagactcgtagagaagcccagccgccattctcgggtggcctagcgtctcatttcaacattgtatacacccttgagtttatttatgcaaaaaagactgatctggatggcaacgactactactttgtgagctgggttggatacccccgtcctacttggcagccagcgtcatatttaccacaagatgccattgcgcgttttgaggaggtgctcggcgtgttttggcctgtggatcgcagagattttatcgagataggcgtgcctacgggaagtagtggtagaagagcgagtgttagaagaacatgaagaaataactaacaatacaatataaattacggcaatatttactattgcttgccgctatattgaaatctttattatggagtcatgctgctggcaatacaattttttatggtattggcggacctctgatgcatgcgcttctcccacagaatctgcaacgtcagcttggggctcttgctgctcagcaggatgcaattcttgcacatgctctccttccaccgaagcatcaacgttcgcagtacgcgctggcagctctgcaatatccgaatgcccttgttgtacgtggtctccacttgccacttcattgaccgcccgacgcaccaaatcaccagcattgacacgcactgattgctctgcaacatactccacaggcagcggcataaacggaatttgtggataatagtgttgccttccctttagcagcgcgttgatatacgtgcgctcgaccgtcacgtcctcgcggaacttgacgtcacgggatccaccatcttcccagttcgcagatgcaacagtcggtagtcatgcttagtctttggaagtccgaggaacaacgcagattcagctttctccgacagcttgttctttcgtttttcctttggtataaacacataacccacacagccacaaactttcaatttgctgatgtcaggtttcagcccagtcaacttctccgtgggcgtcattcccttcagtgcttttgtcggcgacaagttgtccacctccaccacgtacggcaggacttcagtccacaacacattcggcaaattggcagcatgcatcacagcgcgcatcttgttcacgagaactccattcatcttctcgactagtcagttttcttgtggagtatacgggtgagtggggatgaactcgatatagtgcttgttcaagaacgcagccagttcattactcatatactctccccctccgtcactcgtgaaccgggcgattcgtttgccatcagcaactatccccccgatcagccgcagtgtgttgccagcagcttcactcttgtgccgtagtgcgcttatccgtagcgtcaccgaacgtcattcttcgccgacatgcagctcaagcatttcagcttgattctcagttgatccgaagggatgtccattcctttggccacatcatgcttcgccatgtacttcagtgatgcctcgttgagatgggccagacgctcgtgccaacgcatcaacggactcgcatctgcgttcacgttcgacatcaccaccgcattgttctcgccaaaagtcccattgttcaaccagtagtgttctccatgaaagatgaactccaagcatttaccatcacgcgtcaaaaacattttgcaaggcagctcattcggaggactagtggtcaacacccaacttgatttcagcaagagaccaagactgagcaaattcactggaccagaaggggaaaactccacgttatcgagcattagtgtcaactcgctctggctcagcacgtccacggcagtaaccaccacagacccgcacaaacttccgtaccatcccacaccttgaatgttgccttggacttcttcaatcgcgtgaacagctcgcgctcaatgcaaacatgcgacgtggtgcccgagtccagcatccaatcaccactcgtaccgatccgaccttccttcatcgccatgccgacgaaaggttcactctccgaactactgctgctactgctctgctcgtcccggtctacttcagctacaaaccgcatgtagcccattgcaccagtagtcggtgcactgctctgcttgggtccaccaccgtctccgtttccgcccttgtccttctttttcttcttctccttaccatgcgtgttgctcttcacttgctgggcctttgactgcttgtttttgtaatgtcagcaatccttcttgtttttgtaatgtcagcaatccttccgcatatgacccagcttgtggcagtgatagcagcgaatggcacgacgcttgccagctccagtcgtctgcacaggtccatacggccctggcccaggtccaggaggtgggccttggctcggttgccagcccgaagtctggcccatttacatcactaccgagctgccacaactcggtgctccactatttgcagctgagtctgtagccatcttctccatttcatcacgagaaagcaacgcgttcttcacttgttgcaagtttggaaacagaccttgccggtaagagaagtcaaactgagtcacaagttcccgatgcaccgcacaaactcccatcagcagcaactgagacatctcattatcatggatctcaaagccaggccccatgtgctgcagtcgctgacgaagcgagttcatctcttgaatgtagtccgccatcttcttccccggtgtgtaggaatgcgtgtacagttcgcgcttgaggtgcaccgcatacgagaaatctcgctgcgtcttctcagcggtcagcgtcggccacatctccttcgctgtgtcgaagttgcacactttctgcgcatctgcacccttcacaccacgtatgattgtctccatggctagtcgattgcggtcatcaaaatgacgctgcaacagtgggtccgtctcatgacggtgttcctcaccagtcaccactccccacgagtccctctactccaagtacaacttgagccgcatctgatagacttcgaaggtatcgttgaaattgggtagcttgctgctgccaagtggtttgggcacttgaatcacaggattagcaggtagctgtccaccaggttgcccctggggcactgaatccaccgccgtcgcaggctggccaacagctcccgaatccactaaaggctgccctccagacggccccaatgccgcttgtaccatcgtcggctgccccggcgtgttcgagcttgagccttgtccactcgccctcacgttctgcattccttgactcgacacgacttgatttggatcactgctcattttagttctgtccagaagccttctttgggctcataacctagccgacaggtctctagcagagcgcaggctggatcctgctgcgtaggtggccttgcagacgaacactaaacgagtatctcgtgtcacttagctcaacaggaaccaaaaccagaatgctttcattgttctctttctcctaccgcatactcccacatgcaacgtgtcgtacacgaggagggaaagctgtcggacatgcactacagcaacttcaacagtaaaaaaaaatctttggtctgtcgcgtcccaactaacggcgcgcagatcttcttgtctcgcgtccgacttggctccagcatgagtgaacctcgcagcattcatcaactcgcaatgtagccatcggtgtcagcccattccttctaccgacacagcccaacttattagcttgttcgccgccaccaccccaacttgagattgaagctcagtagagcaagctttgcgtttgttcctgccgccgacaagcacccccagcagctatagagctaaacgaagagcccatcttaacaccactactctgtaggtagacccggaaagaacgtatctacagtgaaacaaacattgcagtgtagtctcaggtgctcggcaatagccttcttcattgcagcagtgcagtgcaaatggtaggacccgcgtcgttttccacctgccttgacctccagacaggcgagggtgacttggtggcgctcgcgccgttgcagaaatgatcgcgcgctgagcggccgagagtgcaaaaattactggcttgaaactggtgtatccctcaacaagtcaagccctgtcaatctgaagacacaattgtgattagctaatactatcctgtatcccataggtgggtgtatccctctgcaaaacaaattcggtatttgtaaataaaccctcgtttatcgatgaaaattgatggatcgacttggtcaggaatgcactaagcgattaatcagaccagcgattcagagaacaagctgctacttcagtatttagttttttttgctttttgggcggcagagtacgtcattagaaacttttgacgtgcactgaaacgctacagctctaactcttgcacgttgtcttgttttcctcgctttctgatgtaggtcttcaaagtgaaattgacagcaaagcttctgagtgaaacaccgatccagacactagacgacaccgaatctgtcaagtcaagcaacgttattcagtattaagtgcgttttacaaaggtgtaatagtctgcagtagcgtgttatactgtcgacgtttcagtgacaagttcggcgattcgactatacttcggggtcaggttggttctcgttgcttgctcgttcttgcatgagttcctggtctgcaaatttccttaggagtcggatagcgtcgggcatcttgagacggtccgacggctcagtggcacacagagcttgaacaaaccgccactgctcgtcatctgcaaacgctctaggtcgtgggaggaacagcccgcgcttcacttggaacaccacagcaaggtctggacactgttgcccccaggggtactctcccgtcacagcttccaccacacacatacccaatgaataaacatccgactccgtggtaggaacttggtcggcatttttcaagcattcgggagctttccagcggacggcccctcccgggggcatcctcggacgagagtcagccgacatgaagctcaagccgaagtccgtcaacattgccacaccttctgcgctcactaaaatctggttgcacttcaagtcgctatggatgatgtggcgctggtgcaagaagtggagacccagagcagcctcgtacagcttgcgccatgccagcgaccgcccttccttcttctgtcgatacagatagttcttcagattgccgttggtggcctcctcacacacgaagaaccaggggtttccttgatcacaagcgccaaagaagttgacaacgtgcttgtgtcgcgccttctgccagatcctggcctcgcgccggaacgtgcgtttgtcgtcctcggtcttcgggtccacgcacttgatcacaacctgcgactccagccacgtgccgtggtagacggccccaaaagagccgtgcgcgaacggcgtcgactgacgctgcacttcgtactcgggcagaaaccagttgggcacttccggcactcccagactagaaaatcgtatcaacttggtctgcgcagcttccaaggctttcatcatttgcggtccatagtggcgctcatgctcctcggactcatacttcagcatcttgagagcgtcttcctgtcgcgccccgctgcctagctcgagcaatatcccttgcatgtcggtctccagagttgcagccagattcttgtacacgtccgtctcctcttggtcccactgagtttgccaagctcgctttgtcagaatggagtgctgcttgggggtcccttgatccatcagtgcgtcaatgtcggagtgtagctggcgtagacacccaacgaccgtccgagtactgacgagacgctcgagcttcaacttcttcgagtgttgctggagcaacacgtggaacgtactcataatcttaaaaagggacatcctggaagcctctggcgtgctgactccactgtcttctagctgcttgtgtgccacttgcactcgcttcagtaagtgttcgctcatgtgccgcacttccgccatgttggcgcacaggtctggcaagctctccatcatggcgtgcagttgctggcgctgatgctcttgaatgagtgcgagcacctcgggcttgccctgagcgaggtcgagcacgttgtggccgcttcgattcgacaagcccagcgcggcgttcttgtcgaggagcagctttacgacgtcctcgttgccgttctcgaccgcccacatgagagcagtgcgcccattagcatcggcttcattcacatccacgtcgcgctggagctcgcgctcgatggaggccaggtcgccgccctgcacaacctccagcagatgcatcacgggcactacagtagatctcttgggggcgcgctcaaatccggaatggcacaaaggctcgcagacgaggcgcaaattactttcagctcgtgtgcagtgcgaaagcagctcaaggattgaaatcagttgacgacatgactgccagcgctggcgcctcgctgatgcaggcgaatgcatccgtgcggtgtgcctcgacgccagctttttttctttctttctgcggttcatcttcaacaagtcgtacaaactttatccagccctcacctagatgatcaatacaaatttatgttgaacgatactttcgtagttcatatcctcttctaaacgaatctagacaccacagatcttgagcgggcgttgaccaaggggcataagccgaataagccgagccgagctacagcccgacggcaccgcgacgacgtcgcatcaatccatgggtggactgggacgagcgccgctcgccgctagtccgatctcgatgaccatcttcgttctcgcctgccaaagactccgtcgccgctaactccaaaacaaccagctcgaaggtccaagacaatggagcgggtgtccatacttgtgtctccgctatgctctccacgtagcaacgctcgcggaaatccgtcactgacttcgtccatgcgggtctcgtctcaagaagagccgctcggggaaagtagtctgaacgatttcgctggcgtggacgactgggaaccgggccgggtggtgatcgaaagtgtggcactcccagtagacgggatgggatcaccaagacgaaaacgagggtgacgtcgtacgctctcaaggtgcaactgcgaggggggctcgaatgaataatcacgaagcgctactcggagctacgacagctccacaagtcctttggagcgcgggtacgacatctgcgtttccctgggaaatcctacgttcgcaatctcagctcagaagcgacgggggaacttgaggtatacctcacagagcttttagggatccggccgcttcttcgtcgagaattgcttaattttctgggtgtgtacacgaatgtgcgagagtttgagtgcctgtggcgggctcttgcaaaaggggacagaattctcgacggatccgtgcagcatggagctgaagaagtgaacgaatgggcccgtatgttaccgacacttcaccttcagcaagcagtctttcatcgggaagcagctgggtggaccctgacaacggtacgctgtcagaaacacactcaacgccacccttctatctggagggtctggttggcacgtgctatcgcatggatgaacttcagggcatttgcgaaaatgtggttgagcgcttattcaaaactcgaaatcggctggacgaagctgatttctctgctattccgaatagattgagagcagcatttgcccaaatcgggcatcgttttcacgccttcctagaccagcacgcccaccgtacaactattgagcgcctcgtgagtgctcgcactctgatgaatgtgttactggagatcaatcgcgagctggattccatgcagcgaaacatggactttgacgaagaagagtgggaaagtacctggagtattcaggtccgtgacgtcgaagagaacctggtctccgcatgggaagcaaatgttaaaagcctgcgcacggtgctgccagatgcagaggctcagctcgacgccctaactttgctgaagaacgaggtcagacagtctgtgtcgaagcgcggcaccagttctcaagggatactcgaggctgcagctgaagcagtggtatgtatgtcggacacatcgattggtgctgtcccagatcgctttatccccgagcacgaggtgcaaaaggagtccacaccattctgctctggatcccggcacagtattccgcggcacttggatgggtgcgaacgttgtcatctagtacgtggacgtgaaatcgccggacgatatgtgtacattcctgcaagaagacaaaatctggaacatggggcgccaccccaacgttgtcacgtattgtggggcctgccacctcccacgtccgtgcttcttcgtctctgaggaagctgtgaacggcagtgctgctgagcttttagcccgggagaagtcccgcggaagatctgtggtttggcgaacgatgcacggagcggcgttggggcttcaatttctgcacgagaacaacattgttcaccgagacttacaacattgtggcagataccaatgaaattgccaagctgacagatttcggaataagtttgtgaacggctcaggctgcctgtcggaactgttcgctgggcagcgccagagtgcgcggtcagacgacaacgaccttccttcctatcagacacgtattcgctaggaatgtgcattgtcgaagcggtgacggggagcgtcccgtggggcattcggcaaaccgacgttgcgataaaggacgagttggttcacaagtgctttctgcctcggccacagcagctcaccgacgagcagtggagacttgtgacgaagctttgtgcttttgaaccgagccatcgatgtacgctttcggatgctattcgccagctgaaaagctttgcagacgcctagacggatgcaggagctgagggtagtccacgttaattgaggtgagcgcgccacgaagctcgaaactggtcgtttcggcgtgcaccgagcctctacccagacgcaggctgagactcagctaacgtggagctgactcgaggacacaagcgggtgcctcgaatgaaacatgtccggcgttgcagcgttatggaggtattgctgaggtcattcgtcgacgacgaaaggcgctcgaacaacagctgagtgcaacctgtgcagacaggttctgacttcatattatatttcggagtcgcttcaaataacaaaagtgtcggtgtaagatgtaccctcgtccaaaatatccattgatacggggttttgaactggatacttgcttgtcacgaagctccgttagtgccgtcaacacttcaacgacttgcacgcgccagtcgcgggtgaccacgaggcaatgactggcatgcagcaaagaccctgccaagctgcggcgctatgtccgctccagccctcgtgctctctacgcacgtcacacccgtggccttcgctcgggcattcacctccgctcactgattgatttgctcccacctgtccaagcagagcgagtctcctccacctccaccggtacttaatcaagcatgtactccgtcgccctgctgctcgctgtctcgtcggcgctttccgcgcgcacattggccaccgactacgccggcggctggctgaacggctcggtctccacgggccagtgcgttgacatctgctcggcgcccagcgccacgtgcttgactaaggaccctgcgtgtctggccaagcaaaaggtgcccggcgacttcgactatctcgtgctggagcagctcttcgtgccgcagttctgccgcgacctgctcgtaccatctcgcaccagaatgtcaacccgtacccgaacggcacggtctgcgcgcccgagcgcgctgctagcaagctcacgatccacggactgtggcccaactacgacgacggctacgtgagctgctgcaatccgagcgactccgtggcgaatgacccctacgatgtcgtcaagttcgctgagagccaggcgacgctgctggccgagatgggggacaagtggattgacgcctcgcagaagtcgacatacgacacgctgtgcgagatttacgaccacgagttccagaagcacgggctctgctacgccgctcagggcgctgacctcgaggccgccgccgtcacctacttcaaggcgacgctgagcacggcggaccgtctcagtgccgccacggagcagattaacgcgtgggcggcactcgacacgccccagagcacgttggcggagatccaggctctgtacgaccaccaggtgatggtcttctgctcggcggtgaacggcgagaaccagctctcggtaatccgcacgtgctacgagaagccctcggacatcggcagcgaaggccccaccacgcagatcgactgcgccaacgccaccgccacgtccaccttctccgtgtgctcgggcgacgagccgatcacgctgctgctgtacgttgcccctggctcgacgagctcttcgaccagtgtcgcggcttcaaccagtgcgtcggccagctcagcttcgcaggccacgacctcggctccgacctccgagcctacggtgagccccaaggcgtgcgcttagagagataacagcgacagacgtcagtcagacttggctctacatcaaataaatcgaagttgtattaacttacacacacaaaggaagtgcgacctccactcagctctcgtcgagttggccgttcaccacgtccagtttgctgtccacctcctccagcgcgtccacggttgcgtccgcggccttgtgggtttctgcatactccgctacgatcgcctggaagcgggtgtacgccccgctcaacagttccacagtcttgtgtggagcttcgtctccgagttggtccactcgatactgagctcggaggatccgctcaagcacagcttcggatttcgcttggacgtcctcttccttcatcccctcgcacaggtccacgatgtcgctgatctggctggtgatggaggcagggacgaccgacagcgaggagctggagctgcccggaagctcggaccccgagtcgcctctagagtgcagaggcttgtgctttgttgcgatcgctcccactgcttcggcctcaggctcagaatcttcgcagctcgactgtctctcggtcaggcgcgtgggctctgctttcccttgctcggacggcgccagtgcatccttcggcgtcactaggcggcagcccattgctcggtgtcaggagaagaatgctaagtgagaccatagtggtccttctcaaccactgtcattaaccgcaggtggtcaatttccgttgttggtcacagcttgtatatctggagaatggatacacgctgataccgttaaacccaggtgaaggtactaaagagagctttgagtcaaagcttttggctgatgtgttctcgtcgaggccatagactgagtctattagactctcactaccccgacacttcccgtcagggatccgtacagttaaatcgtttgtggcgagataaaaatcgaagatatctcggccggctctcgtggcgacgtgttgacgacagacaccaaactcgtaaggtccccattcttgaaccaaacctgcaaacgcgcaccacgatggactcgccggactcgccgccacctgcgctgctgatcgtctccaaggcgatcccctccaccatccaggatctaccgcacgccttccagcgtatcaacgacctgctgctgcccacgaccatcaacagcgccgtgtacaacgagctggaccgagtcatccgagtgtacgagccctttcggccgtggaccgtgggggcgatggacggcgccgcagctcgcgggcgtctggacctgctcaagaagctgcgcgtgggtcggagcgccgggtgcccgtctaatgccttcatcggcgccgctcgcaacaatcaactcgaggtgctgcagggctgcaccgatactacggagaccagagcagacccgtgaaggagctcaaggctgcggctgagcgcagtcacatgcaggtggtcgagtacttacggccgagaatgagggagatacaggtgggtcccgcactggaagccgccgcagccaacggagacttgccggttatcgaggctctcctgccggacccccttctgatggaccggattctggctgcggcagcgtcgaacggccacgtgcacgtggtgcagcttttgctcgacgatcgcgcccacctgtacgttttcgttgtgctgcagaatgctgcgaagttcggccatattccggtcatggagttggtgattgaccgatgcgcaatgagggatattaaaagtgcgatgaccgctgcagcgggggcgggtcagacggaggcggtgaggatgttgctgagaagaatcgagacggatgcgaacacaatgtcgaccgcgatgctgatggcagccggcggtgagcactgcggcgtacttgcgctgcttctcgagcactggtcccgcttcgaagcaaccgccgaatccgacggcacagaagctggcaataaaaagctacagaaacagctccgcgctgttcgagatgcggtcaacctctcgttcacgcgcgccgtgcataaaggccaaacgagcgttgtgaagatcctagcgaccaagatttcgcagtcagtcggcgacttgttgcggatgacagcatcgacaaaccgcgtcgagatcgcggaggtgctgctggagattgctcagggcagggactggaagagagaccgcctgcgcgcgagcttaacggacgcactacctcgagccgcagcaagtggcagcgtcgcgatggccagactactcgttgacaactgcggggatatcgataccggccttcaaggtcgcggtctcgagaaaacgcattgactgtgtgaaggtttttgctgaaaagagcagccgccgattcatggtcagtgctctggtaaagtcggcacaaaagggcaggatgaagatgttaacggctctgcttgagctctgcgaccagaaaacaattctggacgctttgcttaatattgccactgcggagaatgaggagacgtgcaagctggtgctcgagaagtttgcgatcagagcgcgtacaccctgatcttcggacacgcagccgaatacgggtttgttgtgcactatagtgcagcaactgctggatggagtggactcgtgtaccatcaaccgtgcgctgactcgtgctgccgctcgtggccatgctgaggtggtgcagaatttgctggacaagtgcgggctcaacgggccgccgcttttttattgggcacagtcgttatttgttttcacatgggcaagaaggcgtccaagcactcgacgccatcgccctgaggaagttccctcctgaattgcagcttcccgagaagaaaaaggactcacctttctcctcatggcacggccaccctacgctcgcctgggccccggagtgcctttgcactagccgcgttccaaaatgcgttgttgaggggtgtctgtgtgagccaaaagtggaggagtatttgcagcggtacgtacacgacgtcgatcacaagactgttttgtattatgcaaggtatcgctgtacagggcctcatgcaacacgcacattttcaactatcgacgatgagtatctagcatcatcaccagaactcttgctagcattcccttaccttctaacctatcaaacgggtgtatcatgcgagctgtttcaccttgtttatgatagcgtgctaacgacaagaggcatatctggggcaagcagcagcgtcacccgttgtcgtccgagacgctattatactctcttatctgttgccggcgtcgaggtggagaagcggaggcaaaaaaatgcaaactattcgcctcctatgctagtgtcattggagcaatacatggaagcgaatgcatgtcttgattatgaggctcttcaaaagatatggctgacccagactgaaatatgctctcgtttgcttgaagcccacatgacacagtgcaaaatcaagcgagtgattcgtctagatcattcgcaaaagttttgcagcaaactcaaagtatttggtgctcaaggtaagaaagatcaatcaagcgaggtacgcatgctactacttgcccaaaatgaaataggtcaaattgttgctcgtggcctgacgtactcagaaaatcacgctgaaactgcggcaattctaaaacctgtggccgcgcaattagcgtcaaaaccacttgaatctcgcttctgtataaccgaccacgccaacggcacacgaagcctcattgacaaggccttcaacggtgcattagtagtcaaacaagaccctttccacgtcatccaaaggttcacagaaggtaaaggatcacgtcatgcggggatggctagcgactgagctgtcctctgctatttacacggccgaccacaaaatacgagagcccgaagaaatggctacactgttttcaaccgctctgggcaagattccagcttcaagcctcaatgtcaaagagcctgagtggcaaggatgcatagctagcaacctgaaccagatccgagtaggagatttatttgttggtgaggctgaatacgtcgagaatggcggcagggtacgagtactttcgactagtcagctcgaagcagttcattccaaactccgcaagctcttagatcgtattgtatcgtacgaaacaggccttcgtatactcgacatcttcctcttgcaggtaattgcatgcagatcatattctactatatgcgtatctaatgctgtggtgtctagcacaatttgaaagtaggggccaagttcggaagaaatcctgaattttttgagtttgacttcttgacgatgtgtcttgctgctgttttgggtcgcgagcaatttcctgcctctcctcagctggagttcatgtacgagctaattacgcgccaaggttccagtttgtgtaatccgtcgtatcgtgctggagtatccagcaattacgagaacagaccatgggaaagactgagtgatctaatccgcctgcgaactgatagagccgaagggaggatgctagatcagcgtgctccgactacagatatccggcggcttctcgtgcgctcacgtgtgaatcgaaagcagacctctcgagctgagtttgtaacattttttcgtttggagccagaatacgaatccacaaatgaattctcctcacacgagttctccttgctgaaggagattcgaggggagcaattggcgtcgagtcaaccgtggaatacgtgcgaggtggtcgcgactataagatttaactgtgctgtcgaccagatcgacaatcccgcgctcgatcttcgaaagcgaagttttagagcaatctctcgtcgcctgtcggccgttgatgagcagatagcacgaagccccgcgccaaaagcaagtacagccatgatccctatcaccgtgaaagctgttgatgacagcacctcgtccggagatgaacgagtgttgcaggaggagctattcacgatgctacgctgctcgtctggtattaagaaggtgaagcaagtgtactacaatgtgtaccaattggcgtcgtgtgtttgtccggaaactagaccgaagtcgacgcctggttgaaaaagcgttgggagtcactaggtaaacgacagttgcgccgaaatcgtgataatgaaggtcaagagccgaccgaagtggcgaatgcaccttcacctcgtcttcaagtaggcctgaagttgtcgaacagcgaggcgagtggtaccgcgttgcgcgagcctgtacttctcgctgccaacgcgcaattggccccagagactagttgtaaaagcgctgtcacgaacggtgaaacgattgcgcctgtagtcgctgcagtaccagggccccctcgtgtgctgcccgaagtcatggatgctgggaccaaacagcacctgcgaagttatgcagattcgtttgaaaaaaatacacctggaaaatggaggatgatcttcgaggaatttcagcgtatcaaacctgggtcggcactgtccatcaatgctctccgctgtcgccttgaaaatcggtccaaaaagcggaaggtgtcaccagcagctcagtccgatgcagctgctcccaattactccgaagaaccccctccgcgcaagaagatgacaatccagacacagccaaacgcaccaaaagactcccgcagcagtgatcagcacaggggcgacgtccctgcgaagcattcaaaacagtcagcgtgtaagagctgctacgagttgagacgaagatgcggtccatcaggcaacaacaagtactgtaagtacaaagctcagagtgggatatcaatcagtgcatattttacgtcagcttaggaaggctctacatgaccaacaacacagaacaaatgaatacaactgatcaattagtccgcttagaactattagactacgggagtaaatatcacagtaccttaagtgcagcgagcaaacctcgacgtcagggcgtcaggagccgagcgcgcacgtctggagctgcttggtgtacgcgttgaagtcctcgtctgagtcgaggtacaacacgggacagtgcttgcgattcagcattagccgcagctagcgacggcactcacactcgccgtcgttaggctggaggcgccctgtagcgatacttccaaccaggttttgctatccatcgttatcttggccatgcgcctacatcatataatagtacagtaacacacgtcatgatgccgcagaataaaacgatgcaacagtgagcttctcaccttcaaagacttgctaccctcggcccgccttcttcctcgtcgcgacaagcgtcttctccttagcttgcatgcgtacgcacgcgtcctgtggcttagtagcgcgccgcctctcgtattgtggggcatgccgacgagtccgccacttcagatatgcggatagatgtcatgaacctccccgtgtgggttcatttagttaaactattaatagagggtgtgtcactttaggacaagtcgggacccacgggactttatgaaggacagctggtagatggtcgccgctcgatgaaacgagcgtcaatttcgcgctggaggcagccgctttggaaggccgggccaatgtcgtggaaatgctgcggggtcgatgtgacactagaagtgtgaagaacgcgttagcaaaagctacggcggtggggtatgatgaggtggttcacttgctttccaacaagaaggcgcggattgcgtgatggagccacagtcgatcgacaccagccagcgcatcagcagagtcgaaaaatacaacgtgaatgtctgtgtatataaaaggacaataaaacgaagtagtaagtctgcgtgcagtacgcaagatgtcatgaagtattagagctcgcataggcacgaactttgacaaacatgagcatgcattacctcaaaaaaacggaacacacaccggtcttcacatactacatatctagtcaccatgagagcgtgggttgtactacaagccggctctactacgttaacactaacgcctactcaacagctcgagcgagtagacggcccaatttttttacattctaggactgtcagggggattatactacgtagctttaaataatcaaaagccgcgacgaactataaaataatacttcaagaattattaataataatacctatcatctttactgaaaactacacgcatacttacttacacactatgaatattttagtagatacgtgggtactgtctacattctggttgagcctgcatgtgctcataatgaaatggcaccatggacaaatccattcctgtacgctgttccgcatcttcattagttgagacgcacgctgcaacgggttcgagctgggacgagtctagatgaacagccagctttgccaattcttgcttcagcaggtctcgatctcgacgtagatgcttgtactcgcgcttcagactcttgatcgcagatgcagaataaccttcttgcgaacacgattggtgaaacccagtagatcgacgagaaggtcgaactggagaaaacacatgtaagttttccataataaaaattaaagacgtacctcgttgttcacctctttacgacgcattttctcgcgcgatttctttcggaaacttcggtcttcttcactggatggggttctcatcatgtcatgaaaaagatcaaaagttaaacgaaagtgtaaagtacatgtacacccagtaaacaaattttgtaccgctgacaggatcccccattggccaagacaaaatcgtcgtcatcactactccacatggctgcgcatggcgtacttggctgcgtggatgatgtggggatcatacccacttgtgccgcctgttgggtggttgccatctgacactggcaatggaggtaacgggttccgctgacccaagctgaagttaacgagatccatggcatcttgtgtcggttggttctggtgggtgacgttcgcttgaacaccggcggggggcaagggctgttgcagcagaattggctctttgggaagagagcccaagcccagacccggttcaaacgcattgccgtccttcaaaatgtcggaaaagctggatagaggaggcgatgtcacgtgctccgtggtatcatgacgagagtcacttgctccctggttgaagtcttgttcttggtaccttggggggccccttgccaattggcattaatgtctgtacgcaagaagaatctgccaaggtcctcaacctgcggctgggtcgctcccggaaacccccgcatctgtaggaaataatgtccatagtaaagttagcgttaacgtccacattccggtgcaattggccaacctttaccgttagtgaagcgtggattattagcatcacgctgggcgctttccacctctggtttacagaccacaatctgaagtgttgcggatttatgaagacgaaaatgtggccactcgaggcacgcgccacacacgcggtccaagtcgcgggatcagaacatggcgagatttgcaaatcgtagcatcgtacagaattctgaactggactcagtcagtttattatttcgagtgcctacaggaatctgctagagtttttgagacaaagtctagcacgatgaaccgcagaatactgtattgagaaacattcgagttcatatttcaacatttataagcgcatcacccttttgtcaagctgactcgacaacctgtacaatagcacgtgctaattgtcgcaacacttttatcattctatgtcaccttcaacagtttggttccgacggcaaactgcaccatcacgtgaagtgcatgcacgaaaatatattctgtgagttttccggtctctgcaaacaaacatgttgatatccttagctcgtaatactttcttctccatgtttatccttcgacatacaagcgctgctcagcagagcctgagcgctttttgccagtacggttgctcactttcatctgtaaggtcaattcccagtacatgcagttttgcaactgctgtttcattcatattgctactgcaaagtgcgggtgtacacgcatagcagtaagcattcaaaaagtttcatccgagcatcaaatgcagagcagagcagaaagtcttcgcttgtaagtcaaaagtggatgaccgctgtacgaaagccggacgcgtcaaaagacaacacaacgaaatacttcgaagtacatgcactgtatgtacagtactgtagacgactgtggtgaaaccctgtgagaggggaaacgtttttcgtgagatacagtacataccaaaattgtacatactgcaggtacggccagtatttcgggtaagctgttgcttttctcgatgccggacataaaaaaagaaatcgactgtctccaaacaatttgcaacttgggatccaaccataagctacgataggttaaccctttcacccaggtttcgacacaactcggtagttgaccgcccagcttcactggtagcaggaccgattacggcgctaaccgaccggaaaagcgtgccacattatgatgaagggcgacttggtagcgactcgactagcgatgaacttgtgcataggatcacacagctccaccagaaggcatgcagctctaaactcagtccgcacattcactacccgacacggctgcagtggccatttttacttttgttcgcccaaaagaactgagtcggtaaccgcggcagggcacgtagcgtatacttatatgagtgaaatcgaatactcgttggcaacgcgaatgtgcacaggattacctcttcaaacttcgacgcctgaccgctttggacgattcaacagcgagcgacacgaataccgaatgtcgccaactcgctcttgaaacgacgaacttcgagctgacaaccagtgtttgcggctgggagtctagcggttccagcacttcttgtcgctagtgaggtacacgatggagacgtccgctctgctcccactggcgacaacgggcccacaagcattgaacatctcgatccagacgcgacggctctagctggcgtcttcttcccccaccaccacaagccaccactctacttccacccgttcatgcgcgctaagttcgacgagataataaaccacacgcggaattttactgctgcaggacgagcttctttgactgaccgctactcatttgaactgaagcggcagtcaacaacgcgctgtgaacactcaggaattcgacgaggatgctcatatgatggcgatcaacatcccaggcgcaactcacacggagtacatccaatttacccagcgattttcaacaaatgaagccaatggcaaacgctccacggaacggtgtaacacgtccaatcctggagaggactgtagctggattttaacgtcacgacaaaatatactcgagatccatcgaccgcaagtgcgaatgcggggcttgagtatcttggtggcctccgaattcggtcgaatatggacgggtttgttgtctggagctacttgttctgctttctcccctagcacgtgccctttaatcaacgctcgaccgagcattctttcgcagcctcgaatgctgccgagtacctccatcaacgcccccacaaaggctggagtgatctcgtacccctccagccttccatacgcgttgaagtgcatctgagccctgtagtgcacgtgcagttgccggctgatcagcttctgaatgagctcctcgtccccgatagcgctggggaacacgtgctggatggtgcgtcgcgagtagcgcaggtgcaggatgccacgcacggcgacacttgaccagttctttccagtgatgaggtcggccgactccagctcgagctttacagacgtatggaacctggagtagtgttcccagatgctcagaatcatctcgaccgcgggtttacctccgaacttggtatgcggctcaatttaggcgtctagaaattgcctctgtgtctctgaagacagcaccgtagcaggggcgttggggacgtgcagacctatccggaactgctggaagtactccatgatgaacttcatcgggacagcggcagtgcagtactctgatgcaagcgacttcgcttcacacagatcccgtaagacctggaggcgctggatctcgtcgcgaagcctgtcagtctcctgcgatagtgtggcctctcgttcccgctgtcgctcgcgaaatttgattcctcgctcgctgttggacatgggcttggtcttacgcttgctcatcggcgtctgccaccgccggagaggggccggagcttagagtgcacgctgaattgcaagctggagagggtggaggcgagagacatttacaacaccgcacagcctcggtcgggtcggtaaggtctctccgggcgacgacatttttagtttctgcgtcttgcacactgcgaggagaatccttttgtagcacgagcggttgcaagcggagggaatcgagcgaggaattaccatgatccagtagaaaagtactggatcgccccccaggccgaccgaaaaacaaactactgtcacagtatttgctaagttcgtgatgcgtatttatcaagacgtatctacctacttctgcgagactggatccttgcgctgcgtcgtgtcggtcgtcgatggcgagtccgatgtctccctcttgtcgattggtagacccaggtgaagtcgatcgattcgcgttcgaaccgtagcttcaggcgcatcggaacgtggcttcccggttcccatgtaagcttccggtacccaacccattgaatgaaataatatactcttacgttgatccaccttttcgcgtatattcgctctacctcatatagctgcccatccacgcctctctgggaccttcgcttgcttgagaagcggccaccacccctacgtcgttcttctcggagtccacccccgactgatgatgcttcctcttcctgctcgtcggtgtcttcgtcgctgacgtcatgagcgaaaataccgggattcagtcggagacggtaaaacgagccgtccaggcggcgctggatgttccgggcgtggcgctgtcgtgggttaaggcgtggcattgagcacaaagcagaatggggcttgccgaagcgctgaaaatgtagttcgcagtctatttctattctaagtgttgccttaaaataaatacagtagacttcagcccggaggtcaggttgtgatttggctaaatttaacgtagtgaaattgcaaaattcagattgcagatcaacgtagcatattgcaccattgcggcttaaagtatacaaaaagggtgtaccatggagtggtacattcgtagagttcctactccttctagagtttaagagattttcacgaaatattttactcgcgtgttcttagggcacaacactagagatctatcggtttagatttttaatataccttacccaaatatgacttagcaacacttgtatatttggttagaattgtcggaaagcacaatatctattcattatgaggtgttgtttgatttcccgtgagcattcacgaaaaacggacacgtgagttgggcagctggtgtagtccggtcgaaatattgcgttccattgagcgccttgcacgcaaatttcgcattaccggagttgtcggccttcacactggtctgcttcacaagaatctggaagccgcacctcacagccaaatctttgcgcttgctgtggactgctttttgagaagaaaatactgaattggcaatattctctcggagctggtaggccaagccatacgttgagcttgtcgggttcgtcgactcgactgcaacatcgtccctgagtagtcccaactccttggcagcttcgagatcagacacgtcgagtgaaaagcgagcagagccgtagtttggggggtttcttgctcttgacttggacatttgcacaatgcagcagaatattgctgtgaatcaccctttagagaattatttattattcaagtctacttagtttttatttagcactagccttcgaaatcttacctcccacgatctatttcaggtgtcccgcaaataaaccgagagctcgaagttagcccataaatggttgataggtttgcaagtggcgtgccgggcgtacttaggatttttttactgtatgaagaaaatggctgtcggcctgggggacgatccagtacttttctactggatcatggtaattcctcgaatcgagcttgctcttttttaccgcttgtgtccagatattgctcatttggagtcggaagcgaacgatccttctgcttcaagtgaaccgtcgcactttatacacagccggctgaacaatgaaatcataatcgagtttgtcttcaccccaggcgaggccgtttgttgcgcagcagacgcaccacgtcggcatcacccgccgaagcagcgaagctaacgctgtctggatcgcaacgaccccggagcagctccacgacactccgttgacaccttagtgctgccatttcgaacgcacaagtgatgccagtcgagtcgctttcctccatcagcacctcaaccacatctgcatgcccatttatcgctgcagagatcaatgcgcaccggatgctgttgctgctcatcctgccaatcaatactcgcacgagtcccacaagaccttgccccgcagcgcagtcaaagattcgacaataagcaccaggatggcatttctcgagcaacaacttggacatcgtagagttgccaagcgactcaacccggagcaaagcctgctcgatagtgtcagcattgctatgttccaggaggagctctagaatctggacccggttcgtgactgctgccttcaccaccgcttcttggatcgacgctgagttgcccttcacgacgagcagtcgaatcatgtcgagatcgtcgttacccaccgcaatccgcagtgcgccacccgtgttcaacgtgtcacacttggccacaactagctctgccatctccacgcagcgtttgctcgcagctgtttcagctatcgaggttacacttagctcaaagtcgtcgcacttcatgtctggacgatttcggcaataatcgagcaggaacgccagcacctcgacctgatagcaggaagacgcggcaaacagcgcgtcactgatcggactagagaaaatatgaatcaacgccttcaccacgttaacacggcccttttccgccgctgcaagaagcgccgaatcgacgatagctctgaatgcccgggtgtctctgtctgcggtcaagccaccgacactccccctctcctccccagtggagccttccagcagcaacttcagcacgtcaccccggtcaaactccgccgctttctctagtgcacgtgcaacagaaatcctctccaattgacacctgcttagcagcagccgcaccacgccaccccgtccatcggccgccgcagtcaccagcgcatcactgatggtatagtcgtcgctaatatcgagcagcaactccaccacgtcgcagtgtcccccctccgccgccttaatcagcgccgggttcacgagcatgtacctgtctgtgtaccccctccccagtaggaactgcaccacctgcgtcctcccgttctccgccgcagccagcagcgacctcctcatactgtacggtcggttgagtaggtgctccagcactgcgacgtgcccattggcggctgcagcttcgagcgccggctccacctgctcgcgcctcactctgggcagcaggaagctcagcgcctcaatgcggctgtgctgggccgctacgacgagctctcgggccgggtccgccacctgcgggtagtgctcgtagagccactcgaggacggtgaagtggcggtgggcggccgcgccaatgaaggcggcgggcgagcagccctcgcttctgttggcgtgtagccattgcacgagcccgaggcgtccggcggctgcggagccgtccatggccccgacggtgtacggtcgagagggctcgtagaccgccaggacgcggtgcagactgcggtacacggcgcggtcgatggtgggcggcagcaggaaggaggtcaccaggtcgagcacgggcgggaggccctggaacgggctcttcagcgccagcaagccgacgcggaggggaggtgggggctccatgttgaacgaagacacggacgttgggtagtagtttgaagtagtagaactactcaaattgtactacggtagtagtatagtactacgcttgataataccgtagtacaaataggtacataatgctttccattgtgtagccatcgctggctgcgtgctgtcaggcagctgctcgaagtggacgagttcgtcgaggccgcgaaagaggacgatcttgcgaggctgcgtgagttgttgcgccacgacatttacgtcaataaggagagggcgctggcaagtgccgcggaaaatgggcaactggaggtcgtgcggtatctggtcgagcaatgctcagcccccgagactgtaacttcatacaaaccgatgagatttacaagatacagaccacaggtgagggcggctacaagcggcaacgctcaagtcgttcggtacctcactgcactctgtggagaggttggagagaaggaggaagctctgagagaggctgccaagggaggtcacctggaggaggtgcagtgcctcgctgaggagttcggtgctgatgtgaatagccgggtggcggatacgccgctgctgtggggtgctaagtgcgtgcgctatcttgtcgaacaacgcggcgttgatgcgaacgtcagaggctggggccagtccaaggtgctgatgaggcggctgaacgcggtcattttcacgtcgtacgatacatcgtcgaacactgcgacgctcacgggggccgctgcgaacggccacattgagatcgtgcggtacttagtcgagcagtattgcgcagatgtcaacgcgaaaagcgtctacggatctactggcactgtgctcactgaggccgctcgccaaattactggtcctcacctgttgctagtgttgcagtgtagcttttgctctacagtaagttgaagtgcagatacacaaaaggctcaggagctgggaaaaagtaaagagggggaaaccacagaacacaaaaatacaacgggagcagcaagtcgctttactcccccgcagcgcgttcaccttctcttcctccttcgttgtgcggtgtgagttacagacgcacgcaaaagcagccaagttacaagtggttatgagcccaacgctgcgttggtaactccccgacagtgaagaccatgagtgcaagtgcagacacgaagaagaaggacacgaaggacgagaagaaggccgctcacccaccgttcgatggcaaggatggttcgagcgcatgaagttgaagctggaacgcaagggcgtgtggaagtactgtgagaaggacatcgaggagccggaggagtcgaagcaggatgagcacgacgcgtgcaagaagaactctgcgcacgctaaggagctactctacgacggaatgacagacaagataatgaaaactgtgaagtttgagccgactgcgctccgtgtagtggagagattgaagcagagattcgtcgaaaaaacgtatttcaagtatgcagctgaaatgacacagctgaggaagctccgactcccggagaacggcaacatgtctgatcatttgggtgaagtgcgaagattaattgatcgaattgctctattgggtaaacctctcgatgagtatgagaagcctgcggttttgatcggcacactgcctgacgcctatgataacgtggtggaaacgtttctggcaagtcacggccctcgagatgtaaatgaccctcccaactatgatcaattggagcatgcgttagagctcgcgtatgatcgacgccaacgacgaaagctggacgaaggtagtgaagaccaagctttgtttggaggatctggtagaggtcgggaccgaggccgagatcgtggtcgtggtcgtggccgtggttctgatcgtggccgagggcgtagttttggtcgtggtggtggccgaggaagcagccaaggagctggacgtggtcacggatgacaaggtatcagtagaggaagatgctttcattgtggagagcaatcgcaccaagtgctggactgcccgcacttaggcagacatccgccaagtggtgctcgtggatccgagcctcctcagaagcaagccaaggtagaaggagcgcagggaaaacgagctgctaagaaccagtatactggagatgagagtgatgaatcggcatacgtgattactgctctcatcaagcagcctcccaacgtgcagaagtttgcgagcaagcgctggtacttggactcgggagccacaagtcatttgactaaccagaaaattgattttatttcgttcacggcattggtgagagttggtggtgagaactggttgactgtaactgaaattggtactgtgaaaaaggagatccagactacaagtgggcggcagacgttagtactgcgtggagtacgttatgtaccagagctgcaatgcagtttattctcagtgcgtcgacaaaccgcacgaaccctgcctgatgatgagaaggttcgagttcactttgacgacgatgaattcgcaaaggtgaagtttgaacaaggaagtgcgaaggcacatgttgacagaaccaatctttattgcttggagctagaaagtcctgtggattccgcattggttgtagccactgatggagaccacaaggtgcagctgtggcacacgcgccttggtcacccaggacggacagtattcaacgcactatttcgccatgcagactggccgctgttagctgtggatttgagagtcgggcgaggcttcaactgtgacgcatgtgtaagaggcaagatgacgagaaagagttttcactcggtgccgagttcgactcgtgactggttagttggagaacgagcccacgtggatgtttggggaccgtatccagtggcttcgtactcgggcatgcgctactttgctctcttcgtcgatgaggcttctcgcttctcgacactgttcctgatgaaagagcgcaccgacgtctacgcaaagttccagttctactatgagcgagtaaaaacacaattgaaaatccgaatgaaggagcttcgttgtgataatgctcgggaactactggcgctcggtgagatgtgcaaacgcaactacggaatggagcgctcgctgactgtgaagcatactccagagcaaaacggggttgctgaacgaatgattcgcacggtgactgagaggatgaggtgcttgctggagcatttcggactgcccaagcagatgtgggcggaggccgctgtcactgcagcatactgtgtgaacatcgtgccgaacaagagaaaaggaatgcaagtcccgtatgcagtgtggttcagagagacacctgcgtactcgagacttcggacgttcggttgtgctgtgttagcgtacgttgacaaagttgagcgtaagaaaatggattcacgagcgaaagaagctgtattcgttggttattctcgtgagagaagaggctaccggttgctggacagcaagacgaacaaggcgttctacacccacacagccgtcttctacgaagataaacctggacgaattctgttgaaggatggtacagaggcgccatcagtccccacatccgagtacttggacattgatgctacgacgatgcaaaatattccgtctctgttggaggaagcgcaagctgatgagaggcatgcgtcagagtgcggaactggtggggctgatgaaggagcagtgcgagcagagactactggtgaagatcatgcacagcaggttggtggtgccgcaagtgagaccgtgccgttgcgaaaaatagagcgcgcgagtggaaactcggtttcgcgcaaaagaactcgcactgttgaaaaagtgaaaccaagtgcagaagcagcacgggtgagtgaggagaatgcgcctcgtcggaagaagagaaaaagagggaaaagaaagaaacgaagttgtgaacggtgtgagacaccaaacgaggagtctgatggtccgggcagtgggcggtgtgtgacaccggttgtgaagcaagatgataaggaggcagaagtgcagcagtcttcgactcgttcgactggtgagatgacgaccgctagacacgagaagctggatgctggtggtgactcgccgatgggggactttaagcgtctttgagcagcgagatgcaactcgcagtaaggcgccgaagactggctgcatcgaataccggacgaagagtggcagagtgtcgaagccaccacggtggcttggcgacaccattcatcttgcgtacagagactcaattgagaagaagcggttagctggttcatcaagctgggaggtgaaacgtgatgaaatgcagtttgaaattgcgaaagagaaagcaatggattggtggcaggacttctcttgtctttcggatagtgtgattgatgagccagagaccctggatgatgcaatggatagcgactacgcagaggagtggctttcagcagcggataccgagtatcatgccttaatgaaaaatggcacatgaaagctggtccctcgccagaaaggtatgaaggtgctcggaaaccgttggatattccgtgtgaagtatcttcccaccggagaaatcgagcggttcaaagccagattggtggtcaagggctttatgcaggtctatagcgttgactatcttgaagtgtactcacctgtggcccgcttggagactctacggatgctgctgacactagctgcaacctgggactacgaagtcgaccagatggacgtgacgaccgcattcttgaatggccctattgatggagaagtttacatggagcaaccaaagggatatgaggaagcaggaaaagaggaatgggtttgcaaactggataaaagtctgtatggcttaaagcaagccccccgtgtttggttccgcctgctgaaagaccacctagagaaacaaggctttttgataatgaattgtgaggcttgtgttgctgtgaaagtggtcgatggtgagttggtgtttatctccatctacgtggatgatttgattctcttcgccaacaacatgaagttgatgaaggagctgaagtagatgcttcacatgcgttttgagatgaaggacttggggccgattcactacaccctgggctgggagataacacgaaacagaaagaagaggtcaattttcatcaaccagcgcaagtatgcagacaaagtattgcaacgatttgacatggaaagatgcaatggctgcaaagtgccaagcactcctgacttgaagctgtcgaaggtcatgtgtccgaccacgagagaggagaaggagctgatgagtgggaagccgtatcgggctgtacttggcagtctaatgtacttgatgttgggcacgcgccctgatttggcttacctggtccgtgagtgcagtcaatttctcaaaaaccctgggattttgcactggcgcgcagcaaagcgtgggttgcgttacttaagggagacgcaggactgggggctacaattaggaggagtgcaatggaatgagcaggaattggatgaccatctaaaagcttttgcagatgcagactttgcgaaccgagtggacgatcggaagtctattgctgtggcagcacaatttcatgggcaagacagacagaacggacggtcgcattgcacacgacagaagctgagtacatggcgctcagtcttcttgtccaagaagtcatccacctgcggcagatgttgaaagagctgaagatgaagcagaacaacccctcagatgtatttgtggataacgagagtgctcgaaagctggcaaacaaccctgaatttcacagccggacaaaacacattgatgtacgacatcattttgtccgcgaacgtgttgagctgaacgagataactgtgaaacgagtggctggggctgaaaatgtggctgatgcattcacgaagccactgcctcgagtgaagtttgagcagcaccaagcaagcatgggattgatttcccaagggcaatgcgagactaccacgaactcgtgcaacgttgacaaccagtaggtggggctgttgtgaattactggttctcagtgttgcagtgtagcttttgctctacagtaagttgaagtgcagatacaaaaaaggctcaggagctgggaaaggagagagaaaagtaaagagggggaaaccacagaacacaaaaatacaacgggagcagcaagtcgctttactcccccgcagcgcgttcaccttctcttcctccttcgttgtgcggtgtgagttacagacgcacgcaaaagcagccaagttacaagtgtcatattcaggttgtattcaggatctagttgaccagtgtggcgcaaatgtgaacggcaaggaccagtacggagtcactgcgctgatgaaagcggctgaactcggcagtatcgagcttgtacagtatctcacgaacttcttcattgtgtcgatcggcccgatccgcgatcaccttgcgtaggcgagcattcacctgacttcgagcctgatcgtagtgcctctggatccgaaaacgccaccgtcgaggattccgatcccgagtccgagtactacccaaaagtatcgtcgcctcgagcgtcgatcgaggatcccaaccaaccatgcatcagataaaaaggggagtctccacggacttgatcttgaaccgtgttgatcgcgaaggtcaatcgctctgcgtactcatcccaatctctctgatccagatcctccacgaacatcttcagggctctcgtcgccgtctgtaccattcgctctgcagtaccgttagcttgaggtcgatatggcatcgtcgctcgctgacgcatacccaggatcttgttaaaggcgcggaagaagtcgaccataaattccggctctcgatcgtgcctgatcacctcgctagcaccaaatcaccggaacacacactcttcgtaaggttcagcgatcgtctgcgccgttcggaaggaactggccttcgcgatctcgtatcccgtgaacagatcgacccagatcaacagttccgtattacccttgtacgacttcggcagcgaaggtatgtgatccatcgctatgatctggaacgggtacgtcgcctggatgttccccggcgactcgcccctgatcgtaggtcgtcctttgccggtctcgcagtcgacacattcaccgacgtacttccgcacactcctgaagagacctctccagtgaaagtgatcgcggttccgctgataggtacgcccgatcccctggtgtcccctcccaaagtggagtgatagtgatgcaagatatcttgatgcagcgtctccggtgcaaccagtctcatcggtccatctcgatctgcctccgatcgcttggagggtgggcaatagaacagcagattatcaccgtcgatctcgtaatccgctgcgatgttgccataggatcgagcctcattctgcgtcagatcagccacatctcccatcaggtacctcttcatacccgcgatccacgtttcttcatcttgagctcgacgaattcgatcgatccgcaaccctcgcacgaactcctcctgcatgacagtcgggttctgccgtgatctgtcgcccgatcgagtggtcatcggcgatagtcgggcgatcgacccatccgatcgaacaaccaggatctcattaagtcggttcagtgtcactagatccccaggatcgacctcatcctcgacgacgatgcccccttcacgttggagtgctgcactggcaaggctgtccgcacttccgttccagtctcgtttcacatgtaacagctcgtgatctggccagttccgtagttggtccagcaccttctgctttaacaatgtcagcttaggtgctttgcagtcgatctcgccccgtgatcggtgtcgtcgcgatcttcaccttcagtgtcgaaaaggcacgatgagcacggatctagcgttcatcggcaacaccgacttcaggaactggtggagtccgatcggggttcactgggtccgtatccactgagttcggcacttgacgatccaggatctggcgcagatcggggctcttcttcagctcggcgaagtccacctcgcgcagttcgcacaggatcgcagcgtagatcgcgtaagcttccaagaaacggttgtagtagttgagactgcccaagaatgactgcatcgatcggagcgatccggggaacggcaggtcggtcagagcggtgaggtccttcgcattggcttccagcccgtcgttcgacacacgatgtcccagatagtccaccttacgcattccccaagagctcttctccacactgatcgagaggttccacttatcccaaccgtccaggtgtatcctgaatagacaacgtgtatcccgaatggacgactctccaagctccaagatttgaccatataaacccaagacattatcgaccgaccaagccgaccgtccaagatctgctcggcacatggaaccttgaactccctcccagctgtgctgccgatccccggtggatctttgcgactcaaccgacgacaacctatactgaaaccaagataatacttccaagactgcatgttacgattagtgatagcctacaaagataagaccaaacagagttcgtttttcctgctacagcgcaagtgtcttctgttggggccaggctattcagagctggttcagactcaaaggagccttgtgtctttggttctccccccgcagtcagggcacctcggctaagaacgtaagggtcgtgtgtggagctctcatagtacgtatcaaatcaagttacggcgagtacctgagctgtcgtgcggccagggttgataagctttatttcatattctagttggggtgtttgtcctggacagcactgccatttcatattaagctactcctagggcggttgaggtagtcaccacctagtgatttgtcgataggctactgagtgataggtaggaccgtgttttgtattgattcggctttttccctcttgattgagggtcttggacttgccagtgtcctggatctaccctcaatgttgactggtgtgtagggcccaccgtccaagggccaaccaaagaataagtgacggttgtgtgtattgtatatttgtgtatgactctgtattgttaaggttatctctccggatccaggctgtgaaagctgcgttctgaagtgtgcgttggctccgctttctggtcctagcgatattatcctgtttcctgcaactcatgcagtgcaagtctcacgttcgaagacaaacgacacccaaagggattccacaagaaacacacgccacccgggacgacaccaagtgctcatccagggttgtgtcgaggggacaagtctagatccttttctggccactgtacacctgggcggcaaaaggcgttcacccgcctcgcctcagctggtgcgcgtgcccggattcgaatcgtttgggacttcactgagttgcggttacatttattgttaggattgaggttgcgaagtctactaaccctctgaccgaagcgtttatggcgagaggaaacggagaagacatgcgcgaggaaggacgcgatggctagggacgcggtgatgcgtcgggccagtcgcgtaggtctcaggggctgccggaggagcacgcgagtctggacgaggttgtccgggctgctcagaaggcaggcgctgcaaagcgcaaggcggcccgcgaggcgaaggccaagtcgtcggagaaggagccgactccagcaccgtccgtccaggatgacgcgcaccaagtgtcctcagatggcgagctggacgtccaggatcctgacccgaaggctgcccaagatcagggtgagtccgtccaggatgagctcgccaaggcgtcggcgggaggcgccgatgagattgagcccccggcggcggatcgatgttcggactctccgctgccggatcaagatgcggagtccaaggagaccccgaacctggaagacaagccgctaccgatgtccaagaagtggacgagcttgaggactcgcaagagacctcgccgtccgcccaagcgaccatgacgaaccctgaatcctcggtccaggaagcttcggccaagacggccctgaatcaagccgtcccacaccaaggtccggatccaggatcgcttcggtcgggatcacctgaccagaggttcgccgaggtccaggagaaggcgttcgtcgcgcagcaagtgtccaggtgggagcgggtggagtccgaacgcgtgaccccgcccactgtggagtattcctggccgacacccaggccggatgcacagccctggatggccgccatgttgaccacatccaggtacctcagtgcgcgagcactcttggaggaccaggatggtggctggattgcggaacttcgtctcgaccggcggtacttgagcaccacccaggatctcatggctgtccaggtcccggtccagatgctgacgccgcgggagtgcatgaccatcctgcaagatctgctgttcgaggctggattcatgtttgacaggatcttggtgaacgcatacaacgcgtcgtccagaagtcgctgatagatctgacgagcgttcttcaggccgaacggcatccggttcccctcgaacagacccatgtgggtgataaaggccgagaccgcacgagctcgatcggtcattgtcaccacccagaatccactagccatgtccaaagagcaataccagagtaccttgtctagatcctccagcaaatcgttgatcaagggcatcggatataccatcagcctggttagactgttgacgagccgataatcgatgccgagtcggatatccacgccgttcttcttgatgatcacgacgatcggcgaggcccacggtgatcgagatttccgaatcatcttggctgacaataatcccttgatcagctcggacaccttctccacaaacggggggccactttccggacacactgagcgatcggctttgcgtcgcccacgtcgatgtcgcaggtgacaccccgggctgctgggggaagtgcattgcccttgccgatcagcaggtgattcctgtgccagatcttctttcgcagccgatcgaactcctccggggtgttgaactccagatctcccaccttgatatcatcgatcttcacctcatccgtcgtcgagatcacaatttcaggaatcacagctaattaaccttcgacatcttctgctgaccgattcccgccctcgtggtaatgggcctgatcatcagcgccaacgtctcgatccggttcggatgcaatgaggtcgcccaatttgaagtgggtttggcctccatttccacctgatcaccccaacgatcgatgagtattcagccacttgcggcagtcgttcagatgcaggaacaccgtcgactgctgtatcgtcacttgatctcgactcttccacagctaagaccgcaaccgggtgtgtccgatcggtactcccgcccccaagatctggttcgacggcacaaccgtcgacctgatcggccgatggctagtgaggggacacgatttcgcccttctcagctcgaaatccacatgatctggcttcccctcttggtcgccagcacgataatcttgcggcttcgcgtcatctatcggtgcacacgcttggtccgtgatcggcgaaggctgggagtccagccccacctgtttccgctttggagagcattcctcctccgatccggaaggttcacacaccgactcaacaggatccgaccgtgggtctggtggatctccgacgaggacagttgaagcagacgaccccgactcctctgtcacgcgatcatcgtcctgcaacggtctgccccctgatctaagagtatcaacgacggtcgcccccggatcagggctcattacctccggttcgcttgttggatcgggtggacccgtcgacagatcgacgatcggggataccttgcgtctcggggcgttcgataaatcggtcgctcgacggcaggtactggaggtcccgttggtgcctcctggttcgtcggccggtcatctgtcgtggcttgaaaggctagattctgccattccatgtatcgacgagatccgatcgacacatatcctgggatccggggtatccgatctccagccagccacatcccgatccgttcattccgatgcaagacgaggtcattgtcgctgatgttggtaacctggcgatatctgatcctgctgggtcctcggaccacagtcggcacccaacgatctccacgggtgacccatagcttttctcgatccgtcaccttcattcgtagcggaagctcaatcgaatctccgatagcgatcatcattccctgatctacacacacgtgtctgaccttgtcgttgtacagctggcgccgtgcgctaagctggatcttgacttcgtcggggagacagatagagccgtccgcaagatcgagacggatccccgctggaaccataaagtccatacccaggatcgcctcttgtcctgatagatcgccaacccagatatcgaagaaatacaccagcgatcccgcaagcgtaaccttgatcctggtccttccttcctcatgtacacgctttcgccaatccccacacattcctggctctgactcgtgtcgacatagcaccccaccttacgagcaaaggcggcgtccacgatggacacctcggcgccggtgtctaagaataagatcgacttctcattgttgatcttgccagtgatcttggcctgacggaaccacttacctggcgaatgatgtttccagtaccctctggactcctctgggatgagatcggcacgacatccacagatctgcggtgttcgttgacgcgaggcagacttcgatcgcgatcatgctccgggatctcggtcgtcacttctccaccagctggcttgaaccattcttccggtctgcgttgcttccaatagccccgcgtttctccagactggagatccaagggcacttcggcgtcagaacggctgaagtcgtccgatcgatgtagacttaagatcttggcggcagatttcgcatgcaggtgacatgtattaccgcgtagatcagtccgtccacttactcgatctaccgtgttcttgttcacgaatgcatagatgcagtaactagaacgctcggctcgtaccggattccaacccggcgagcgtcctagtttaacatcttctcggcgatcgcgggcaacatgccagcgtgcttcaccgggttgaactattgacggatctggttgtagaattcctccatccgacacttgcccatctcgtgtagttcaccacatccacgacacacaagcagacaacgatccgccggatgacctctcttgccacacttctcgcacgtcaaacgtctccaacaatcgagataggtgtgtttccgcgatccacagtgtgagcagcggcttgatcggtccgatccgtcaggtgaagatcgcgatcgtggatccgatcgaggtgagtcatggatgatctacgcttggttgctccgatccagcttcgtcgagtcgcccccagcgttgcgagacttgtcattggccgacgctatgtaaacgcgacgtagatcaccctccgagtccgatccttccgatcctgtgtccgatccagattcctggctcgcgatctgaactgcacgcactgcccgcttggttgcagcaggtggtgctgaggtcggaaccttctgacgatacttcgatccaaaggcagatcgcatccgtctgttcttcgcgcgctctcgagcgcgcaggacttccttcagatcttccgcgtccgcaagccggagtagggtgagctgatcagccagttccggatcgcccagcgtctcgataaagtgttcgacatgttctcggcgggccttggaatctccgtccttgatcttcaatctcgcacgcagagccgccacattcagtcgatagaggtactccaacggcgattcatctgctctcttgcgagaatgataatactgccaagcgaccgatactcccaggccacaatactggatctggaaactccggagtagatcgctccacttgttccgcgtcgatcggcccagctggcggtaccagttcttcgccgggcccgtcagtagatcagcgaaggtcagccacttctcttcgtccgtagcctgatctcgcaggaacgtcgaattcaccttgctgatccacgatcgggcgcggtcttcgtcctgatccttgccactgaactccttaagatcggacatcgccgagattcgcacacgctggatcgaggaggacccagtggatcccgaggcagcggtggtcaccgcagcaggggccgaactcggtagatcagtgtcgtccggatcatgttcccactgggagagatcttgatccggtgatccggctcattccatctccacgtcccgcgatccaacgttgtcgtcgaccactggagtaggtgttaccaccatggcctgttgttccttcagaaatcgagccatcgcagtctggaagtaagactccagtcggccgttcgactcatctgatccggtagcactggtggtccgatcggtcgacttgggtttctgcttccgaggtcctgatcgcatgcgttcctgacgttgactccgtgatcgtgcgtccagcatcgcagatcctgatggaccgagggacatccgttgaggttcacacgacgtatccgatacatgttccgctgcggagacatatggagacgacgatcggtacccagtggactccactcgtggcgatgacactggagccggcgacactagatctggcaccttcgggtccggactgtccgcgatcacgtcgaccaatggtctcaacttgtcgaccaatgtctagattgctgtctggatcacatcgagatcttgatcgaaaagatcgttcgcttcaaaggcgccagccacgaagcctgcttccttcaaaaggccgagcatgttcttcaccgccatcagcttgttatccgtcactcggggggccgagatcgggcccttcgggtcgtcgatctggtctggctgcacgatctccatgacaggatcttgacgcaagaagtctcgcagttccttcaagtgatactgacgatccaggttagcctcggaccagtcgagtgccgacggtctgggatcttcgtcgtccaagcctggcgctctcagattcttcctcacgatctgggccttgtccgcgattgcgtccaggtagtcggatcgagcctgatcggcgagtcagcgaacgcgtatcggtccgatcccgccttagtttgttttgttagtgaatctcggttcgcaccaagatccaccggggtccccgaaggtacctggggaggatgttgaggtttgtcttctagatctgtccccagatcgccctcgattccgtcgacagaagtcctccgagcactctgtcgatccgcagatctcgttttgtttagcagcgtcttcgtcgatccgatatccgacgacgccacttcccctggttctttcttcacttgagcatcttctacgcactcacggtgaaatccggagtcccccagagatccgggcacgcacaccattgaggtgtagtgggatcggccaaaatctgattaaggcctgatcgagcttcccaccagcgcccagacaccgactaacggagggggtcccccaacgatccgtgatcggctgaacttgttctcaccttgtgtacccgtcggcgggctggatctgctctctcggggctccgaagatgcagcacttggtgaagatcgagtgtcttggcgtgacgcggggatagtttgtggagcagcgcggtagtcttcgctctgcgtccgagtatacgctccgatcgagggttcttcgcttcgatcggtcggcctggagtagatccaaggcctgtagttgcctttccgggtgtgttcctccctttcctgagttgcttgccgcttcctataacgggatcgaggttgatcgagaggagaaacgatcgccggccaagcactaatatccggtcgatcgaggacttacacataaagatagatcactagagtaggtcgagctggccaatgtattaacccagtcttaaccgtacagctagttcaatacccaaagtgtcgacgctgccgaggccaatgtagttcctgggacttggtgacttgaggggacttgtggtctttggtgcaaattctgctctgatttatgtttagctggtgtctcgctaccgctaccatctcatctaccatcctacaactcaacaaccactggattcttgtcctgacttcgtcctccatgtgcatccaatcgtggtcgatccctgatccacgatcaacccacgatcggctcccgatctgcgatcgatctcgatccgcgatcgatgactggtgccggttgccgtgcgccgccgatccatcatcttctgtcctcggtcgtcctagatctgcgagatctgtcgtcgatcggtgcttgggtcgaccccgaatcacgccacggttcgagcacgatcatccacaatccggcttgccacatgtcctgccttacgcgccggcgtcatcgggccacttgagatctcccgaagaactccctctgatccacagatccttgctgcctgtctctcgatcgctgatctcccatacttccagtcgatcggccctgccgcctttcttagagaacaattctaattcagcatttctccacgtcgatgtcggcagcatcgaggtgtcgggcccgccctcctcgatgtagatgtcctcagcgcgcaccatgatgctggaaaggcgaccgacacacccgcctggggagtgcgcgtgcgagacagcgggacggttgtggtgtagtgccccacgaggaagcgggcacgtcgacgccggtgagaggaggcgccgagatggaagccgattgacgcgaaggatggaactcggcgcggaggatggaactcgatgcagttggtggaacgcggcgcgcggcagagatcaacgggaaaagtcgatgcgggtgaaagccgtgatacacggcgccagagtccaactcgacgcgtaatcatccgacgagtcgaccagcgccccgtctctgcaaaacgagccgacccttttccccgccgagcaaaacccgtgggccccaaaacccgtcaaccctaaaccccgtcgagaaatcccgtcgagcccaagtcgtgattacgttacgcaaatcaggttgaagagcggcagtgcaagcacgacagacgcagggataggcgtgagtggtaggcttagcaagcaagtagtagggagtagccagtagcaaggacataggatagggtaaggactcagtcccgaaatttctctgaaccactcagacctctcccctccggaagatcgccaggttcttgagaaccaccaagcgtcggcaagtatagccgcaaggaatacgtggccccccgtcgctcgctggctcgggtactcgcccccctcaaaccccgtgttggaaacgaaggcacgtaaaacgtataccggttaggaggcgctcgaaaacgcgcagcctagacgaaggaccgcacggcctgataaccgctgtgcacaagaccccgcgtcggcccgataacgccacgcaacaagccccaggaaacgccggcccgatcggtccgcacgcccaaggaacaaccgacgccctaagacaaggaacaagcgtccactcaaccccccaactctgaagcttgcgaagacttgggctctatattcgaagatacgctactcaagatccgggaaattgcccgtcgcgaccgcagattggacgcgtcgggtttgtgcgaggacgaactccgcgatttctgtgaggccgctactccacataaataataaaagaaagagaagcacaaacgtagcagctacaaaatcgaaagtgcgaccgcaaagacactttatgaatgtagtatagctctcgatccataacgccaaactttttcaaacacatcgacagactattttttagtaacccttaaggggactcaacttgttcaatgcgcaagtaattgtagtagtcgagatgtagctaaatgattattacaccaacaaccctgcagggcaactagatatatttatttccaaatgaaaaaagtcacaagcgacttgggcgatcctcacttgcggcgcaccagtcgcacatctcctctcagcttactttaacgctctagcatatatcgagatagtcttgcgttctttgggttcggtcacaagacgcgcctgcacaggatctgggttcgcagcgagtagattttctctcagtcggacacctttacacacgtactggtagacccttccaactaaactttgtcctttcgagtcgtccttgagattgtgatacagagtcgtgacctattccagccacgaacgcctcgatcatgtcctcactagcattaagatcagacaatattagtgaagttgccgataccgcagcaattgtagacgaacaaattcgtgctgcacgtatttgtggcctgagtgggccttttctagctactttcggcatcgaataaccccctagagcaccagcacgtccaacgcgtcgcattctacagtacaaccagtgaaaaattaagtttaggccaagtttccatgtcacgagtaatggggggggtacctgaagactcaagcggaggttgctgctccttcttgcccttatgcgagcatccagctcatgtctgttctcctgttcagcaaattctaaaatgtatttagcgagcaagccccgctcggatcaggaacatcatgacctatacctccatctaaaggccttctggcctatacctttactctttgtcccctcaggggactcccctgagttatgtatccaacactagttaatccgcatacaaatgcttagataaatcggcccaatacaacagtaagtcattcgaatacatacaaaactcaagatattagatttcaatacaaaagtcaagtaattaattctggcgataccggtatctgacattaaataggtagtaacgacagttcttacgaactgggaattttcatggcgctgcagagcccggacgtcgctcttattcatcaagagctggaaacgtagcccgcaaaactccactggcgtagttgatgctgaggtccttggacggacgagggtcgagcgtcaccttcgtggcaaagacatctcctacgccagactcttggaactgcaccagcttgcggattgagctccgccactctctccagcggcccgctgcgtttgtagaccatcctctcgaaagagctgatacgggaacttgcgcgtgtcgacgtcggacactggctcacggaccctcacaaactttcacgtgcaactcagtccgtcacgaacgccgttgatgcgggggaatctgcgaggcgccttgctgtcctttggcttccgtggagctgaggacgggcgcttgttgtactgcctgttatcttagtcatggcggaagcgctgcggggccttccgcgctacgtgcccgtcacccttaaagctcgccattgtttctgacgcgatgtttctcaactgagcccacagcttctcttcaactgccgtatgcggtggacaaccccgtggtaaaacctccagcctcatcacggggcgaacgacccatgcacactccgatacaacactaacctcgacatacaccccaacgtgcacaacttcaccgcgaagatggccgccaaccatgtggaccccgcaacagtttcttaaggggctggtcgcgctggctggtgctggttctcggtcgggacggcaagctatatgcgaaatgatatcgtattatttttcctcactgtggacataaccatgacgattcgccgagaacccgggaactcgatccccttgctggttccagggttcgggatccgctaaggagggccctcatcgggagggccctcgtaatagagtcgacatttgggaaacagccgattgtgacaaacgcacatttgggtcattcgtaataggtacatgtaccaaaacgagagctcggttcataaagcactatcccacctctcatgcgtgtccaccgtgccttctttgcctgggcatcccagctacagtaagggcagggagtgtctgcccaggcgaaggttttcgctaaagaagagctcgacggcgcgcatgaggctgcagtcaccaaggcatggttcagcaatcgcgccggcaaggccctgcgcgcgaattggaaagcgctaacgccagaagagagagagagagatcttcttgcagagcactgctgacgacacgttccctcggaagaagcgcccaaccaggtgctagacgagcgccaagatggcgctcgctacccacatcgagcccgcgctgctatcacttcgactgactcgcgcgttggtagatcctgcgacgccccagttcaagcggccgaccaggctctggccaagcttctacgacagcgcaatcagctctgtggcactgtggcgcgagccgcgatgtcggcagagctggctgctatggcgatggctgttcggaagcgtgatgccgatggtgttgctgagtctgctgctgcggttattgagtgcttgggtgcgcaagtggctcgcagcttctcggcaggagcacgagacaaattactggtgttgatgtgggatgcggcggctcatgtatctgccacgagatcgtataatttgttgcatagtgaatctgaagcgatggaagctcatgcaatgacgcgagactcggctcgagaggccctagcaacgttgcgcgactttacaaccgacaacagcagcgtcaacccaagatttaaggaggctgtgaacaaccaagtgccgttcaatccccgatatgctaggtatttgggatccctcgcttggcagagccagtttgactcgggtggcaacgctgtgccggtaaatggatcggatgcttccagtactggtgatttgggagcagagcctgagctggatgaagaagctgcctcctcgctgcattctgcatctgaaccagacctgccggtcccggtccctaattctgacggagcgatagctgatcccgccctctcgacggccgtcacgagcgacaagcaaggtctcgaaaaaacaagtagcaatgaagtctatagttggaagtagtataccccacaacactatgaaataaatcgccgcgacacacaactgcatatccagtagggatctccaattcaatctccatttcagggcgggcaaagtcaaagcagcggggaaacaaccgcagtcttgtcccgggttggatggcaataataacactagccagaatgctgcccgggtagtgggcatgcacagcagctcgcacttcgtctgcatagtcttgatgaggttcctggtatagacccccaggtcgcgagtgcatgtacgaaaacacacagggtctgtagttggagtcgcgggtagctgcatcctcaaggattgcagcggaaacacgtcgaaggggaggtgtcatgcgctgaactcgcgattgacttctgaacatgttatcttcgactccgcctacttctcgaaccacaggtctgtaggtccgagactctgcttcgaggtagagctcatcaatcgtcgcttgggaaacttccaggtagaacacggcgtagccagacggtgggaaagcaaggcgcaccatcagcacaacgagatgtgtaaaatggcaagcactcaatccctcttattatttgccggtagtctaaagtaaactttgcctcggatgcttatttatagtagagctatggtcgtcggcaacagtatcatttccacagagcgttgccgacgatttcggtacatgcacctattacgaatcacccaaatgtgcgtttgtcacagccggctgttttccaaatgtcgactcaattacgagggccctatctccttagcggatcccccgggttctctgtgaattgcaatggttatgtccaaaatgagcaaaaataatacagaagtgaaaactcgaggccgacttagtagttcacctacccctgcccatctctggaacacccgatcgagaaccagcaccagccagcgcgaccagcccctaaggaagctatttgaaaaagcaaaatacagtacggaaaattagtaaaacaactactaaagtatggatatttcatatattacccatgctgtactatactaactattgttgtatttaaagctagactcatatagtattgcagtaatattttctcgacctactattgctacaataacgacgtaatattactatcgagctaacgaaaagagggtgtttgacaaacgtttcgaatcacaagatcgattatatgcaacccggagcgttgctccgggagggtacgcaggtcgacgaatagtttcatggacgatgataacggataataattgagtaaagcccaaagttgttttgtttttaatccttaaaagcactaccagtccaactctctagttgattctaacgtgggcatctactgcgcctgcttcatagccgcagcatctgcccgagaatgcgtacttgaacaaatagttgcgcacatcgaagtgtatctatacggaaatgatgtttcagccaaacgtttgtgaggctggtaaccagcaagccccgctcttctttatcgtggtgggctctcaggaaccgaaagtcaccaattgaggttgtctggtctgatggggccatcgatgacataacaccctggtcagcgtccaatggctgcgttggcgccagcaacaagagagctatttcattcattttgcaggtaaggtatactgtgctcatttttgtactatgttgtgtgctaacgatcagacgagagagctacagtagcggaacgaaggagagacgcatggtgcgctgatcttgaccatttaacttgaggatgttagctaagtgacaataacgatcctcaattcaaaaacaaaacaaacaaacaaacatataacttgagggagtgggggataaattacggaatgagatatacgctagtgggccaatttcttggaagtaagtgcttcaacgcagggaaaaaagtcttattcaaacgagcgatgctcgtgtcaccgtcgagttgagctgattggtttggcgacagacacgaggttgggcatcttcggctaagagtgaatgggtattaaccaaattgacatgtaaaaaaatgcagcctgcagctagacaagtcatgtcgttcatcttcagccaagcttggtcgattatggcgcaaattgatacgccttcagcgaagccatgacgctctcatggtgcactatagcgtccgaaagtgtttgaatgcacgttttggtcaataataaacgattagtatcagcctttggtaaataatgcgcataaatcttagcatttatcgacgggtacccgatccagcagatattagcttaaacattacaattaaccctctaaccccgtattctgtatcctacagaataagtattgtcacaggacataatatccagcaaacttgtcctctctttcgaacttcgcatatggatgcttgtatagccggtattgtgcacatcttcccgttagattagcgatggaaagataaacggggtttattccgcggtaatagacggacgagtataaaccaccaacaggtttgaaaattcgggtggaagcctaaaaccgccgcgtgtcagccactcgtacgttccttcattccgaaactgcgctgttcaagacgtcgcaatgcaagctttgttggggcccgtcgagcgcgcccaagtgaccaaggaccatggccgaagacgatcatgatgagcgccattgtgatctacaggtaagcgagagcgtgtactttgctctgtaacattgtactagtggtatattgattctacgttgcgatgttgattaccagacctggtgatccgacccacacgacgctatgagctctcgcgtgtggcccgattggcagatcgattgcggagtcagcgcacaacctcatcggttcctacgaagccggctacagccgggtctaccgctgatgcagtggctacccaagaggctacagaagacgcgctcctcatggtgtggctacaccggagactacagaagaagcggtagatgctacgccggatgctacagaagaagctctccgcgtgatgaggttacaccggagattacagaaaagggacagaggctacgacggaggctaccgatgaaagcggcaggaatggagcggcagtgccggaggctacagagcaaagcggaggctgccaaaatggcgatgatgacccacggctggcgcgaacattgaagagcgtgcgcatgtaaaggaataagtagacgttggcatgaatatcatatattgtcctgtttcgtacaagaggaaccgtgtgtagtgcgtgtcattacgggctattgagcatgcaagctccctggtgttgttagagagacaatcgtaacaagcttgttaggtgggctaaagaaatctaacgatgcgctaatgtcaagcacaaggaagaattcgcccagttcctcctcactacgtcagttaggaacagggcgatttcttcctccgcgtttatcgcggcgtgccgaagatgggtgactggagccgaagtatgctgccttaccagccttgcgagatattacttctctggtccacgataatatgcgcgaaacactttttctaccatagttgcgccaattctaatggtagccagacaagcaaggtagcaacaaaaagctgagatcgagctgaagcacatgaaattttttattagcagcttctgcgaggctttggccgtaaaactatcgacagaagcagcttatatggcgataaaattaggtttttttcgtaaaacgtaaaccacaatagcgatattagatccaagaattgtctcggattgtactcgatacaagctttctgatgagctctgatttagaggcaaaagcgttgatttgtgagagctagagcctcgaataaaaacgaggtttttcctgcttgcacggttgagattcgcattcagcaatttatttttgcccaatcaggacatagctcatatttatgctacgtttagaatggcgttttaagaagaagttatgcgttatgcggagagttatctataatacatgtgaatgattctgaagtctcaccccctataatacaaaatttgttgtctttttttcctacgtgagtcagggcgaaggctaggcttggattattggcttgtgtaacactgtgttgcggggggtatgcccgtagcggcggctactgggcaacgcagtgcttgccgttcgtcatagggacgtcctggatgagcccagctacctcctctactatgagtttagtctgaccgagggctcgcggctttcgcggaaccactagcgcggaggggtcggtgcgctggctccagatctcagagacctccgtctcgagatcttttcaatgccccccccccccccgccgcggtgtgatctcccctctctcccttggcccctggcgtgtgcattgttcgggaattgttggctggaattagcaatgtcacagaaggatttggccattattcgatggtgacggaaattcataattttagccaataaaaacatgtagtgtaaaatacataaaaccttacgcgcatattatcgtggaccagagaagtaccatgtagcaggtttcgagcgtgctctacgctcgccacgaccaatagaagctcgccatttcggcatatggtggatacattgagcatgttttgttccctttcgtagctgttctgtgcacaatgttcccagcgcttgaccgcaagatgcgaaagggcttccaacagcaaatctttgacaggttttgaagtatactttaatcaagtctaatgcttattctgtaggatacagaataaggtctggggcaggaagggttaagaaagagagacacggtttggtacccggttttggaaagtttaaagttttttgccggggccaagcacaggtcttcgacctgtgagcttgctcctcatgaagtatgctcagcgtctcagcgctgagctggctaaatgtcttggttgcacgaggtgggggttcaccagggttcagtggataaatacttacgttaggtgcgtgaacttggcgtggctttcagtagagatccttgctggatcgagctcgcgctctcactccccttaggtacttgtgttcgtagaccgtgcatcaaccacatccgggtatcccgataaatgaggctgaatacctttgtaagtcgttcttccatcctgcggctaggaatcggccaccaacgcacgaccggggcctcggcgcaccacgagctgcatggacaagaaatctcaacatgctgtcgttcctattggagccaagacaggaaccaaacgcgaccgacaaagtggcatggcagcgaaggtgatacgtattatgcgtctcaacatcctcaccatggcgaggccatccgacgcagcgtcgtcgtcgacatttcctgcatcgctaactcgtagcggggaactagttgacttctattgcaagttctcgctattgcgcgctgtcctccgctttggcgcgcaactggatgcacaaagcaacgttcgaagcattattggtgttaccatcgtataaaccaccaggatagactcgcttcttgactggcaagtctgcactgcacaattcctcgggtcctcgcgcgtggacgccggcacgttgagcatagtacacgtgacgacccgttactgacgaggtactactgcaatcggctgtacttgcgaggatcttcaccttgccaatccgttacttgtgcttgccatcaacgtggaagaagcagcgttgcttgtgacggaccttctgctttggcgcggcaacgtgaaggatatcgacacggtcttgtctttgacgcttgtgctgcagaagagcaacataggtgtgcttgaactctctttgaatcaccaccagatcgccgctgttaaatactcaagtcgttcgacagctccacgagctacggtttgcattggcggcgtctcaagggcctagagtggcatgtcgttacagacgcgtactccatgaggtagcgaacaacttcttccactcggatctccaccgcttgcaagagctggggaagactggcgtcgccggcacactacgctgctcgatatggctcccgtgttggtgacttgcaagagctcggggctgcgaaacccctcaaacgacaaataaagatggcgagtcttttcatcgctggaaccgcgcgtgagaggattgctgtcctgtttgacttgaatcaggcaccggcctcacaaataacgaagcacggggcgttatagctcggttgttgctgcgccatggagcacggttgtttctttccggtttccaggaatacgaacttgtactcaggactgcaactaccgcgcatcgcgtcactctccctgcgggggtgcaacaccgtcggcgaacctggctcgtggaggacacagtttccttcgattgtgaaccggagggtgaagatgaggtcgctaatgtcgctcgcggtgacttggttccaacgtggccgaagctgtacataccgtggatgaccaccgtgcgttgcattgactcgttggagtcgctgctttccattctcaatgtgtgctgacatgttgcacacagcttgtgggctccctctgcagcgcattccagctttacttcgtcaaccaactcgagaaggtatcagggcacgcgcttaacaaccgtcttcccctccagcttcacgacgaatttctacagtaaatgttggttaacgaagttgctgcatcagttatctcactggcggcaacggactcctggcgtaaattcctcgttctcccgcgcctcgctgggtcaatagattcgtacacgagttagagggatcacaccatggcctatgtcaagataaagggcctgctaattcttaccgggactgctctctagcgttagttttcgcgttcttcgggcattaacagcgcagacatctattgaccgtcaacggcacagcaccaaaagtgctcagcgacgacacgtaccgtacttattttattctaactttcagtaattctttataagaaccacaccatatatccactaatgaagaagtcgtaataagtatttccgccaattacatcgctttcgtacgccacataagacccatttaaaggaccaaactagagcacatgccaattccattacgccaagatctgaaatcgtggtgaacagtcgcggaagggtggaagacatgaagggacccattagcggattttaccccctcccaaccaactcccggtattcgccccgctcggtgatatgtacggccggacggcgtcacccatgcgaacgcgtgacgagcctcgatacgaaagggacgtgaaggcccaagaccgagacgaggacgccccagcgcgtcggaagcgcagcattcccgacgagtttttcgctgagacggacgcgaaacgacccgccaccgagccagacgctgcgatggagatcggtacttgctccccctttgcggaggagaagaagccgcctcggaagcgccccaactacctccagcacgacgacagacgcatcatcatcgagcgcgtcgcccgtggagagccccaggcagcgttggctcgggagtatggtgtcacccgcgctgcagtctgccagatgtacaagaaacgagagaaaatcctcgcgcgtggaggcggcgcgctgccttcacaacagcgaggagcaactgctgcctctgcttctactaccggtacccctcctgcagtccgaaagcccgaagtcaagcgtgcgccagtcgctagaagaaacgccgatgcattgccaactgtgcaaggagagtccaagacggtgaaggccctggtgacgaccttacgcaatgaaaggacaagttcggctgctttccaacgagctgcagctcgactaaccttgtgcgtgcgtaagttctccgtgtgtttcacctggcggaacgagctgacggtcgaccatattgttgttggtttatggtgctcagcatcttgattgaagcagctctggctagttacgatgtaccagagacggatgtcgctgggagacctgggcagcacgtcgaattttgtgcgataaggctgggggacgaaagctcatcgtttttgaccgcatttggccaagtcgaccccgacgctccgacaggtacggccgagcaaataggttgttttggttgcgatctctttgagcttacacagcccttgtccgtaggtcaaatacacgtgaaagcggtgcaggataatgggactacgagctggaaactgcattacctagatgtgccagacaatatcacgcacgttgaggttctgctgttttctacgttcggaaacggcggggctgaatccaaagccatcgaggtgggtaaagctaccgcctgctacagaactaggtaaatgaattgccttctcatactgtgggttttattttttaatgtgccaggcactacaaagaattggagttgcagataataggatttctctcgttatggttggctgttcatctcgtggctacgctgaactttctaatcggcatccaagtacgtcacatgctacatgattagcatactctgtcgttatgctaacgtgggttttcgtacttacagaggccgctatcatcgcagccacgatcgacgatgaatggtcccttgacgggtggctacacccccacgctcccgaacgcgtagtcccggtatcatttacttagaccacgagcgagttaggatcatttctcgaatggaaagttgtggttcaagtcgagtattgtgcaagggtagcgacctcctttccgtgtacggtatgtgcgatggttgtcgcaaaatcaagaatacaactgcactttcacgttttgcactcgttggcttggtgagctcgtgcgatatggcgctccgacgaaaacaacgatcagctgaggttacgtcaagaaattgaacgtacatggtgtagacaatgccagaatttgatgtcagaggtcttctgtacgaacagtcaagaagtcgataatacgctacacgtttgaataatacatgtttgacctactccatgctttgaagtaaactataggccgaacggcagactatcgaattctatgcgcgacctctgcggggactgtcggtatcggtcgtttgaagtcgattgaggacgttcactggtggatcttggccgaatgagatcaaatcaacttaggtaaacgccgattgaaatgatcatattcatcactgcagtcaccatgaatagagctgcgagaaacgaatcgagatgctgaatatgatcgaactcgatgccagccgtcatctctagcactatggacacgtagtcgacgacaatttcaacccccacctgaaataccagcaaatataattgattcgtacgccaatccaccacaccaagttcattttccatagtgtcggatctcctcagcagcgaatagtgagggttgccacaatagaaaaacagaatagatgccgagcacccaatggcgatgtattcggcatacatatctgcggtgagttcagcggtgtggaagacctgcacctgccgatgccacacctcaaactcaacgtgcattgccgatagagagggtctaacgcttctcggaccgtcaatcgaactccgtcgagagcttaccgctattgtacccagcaatgttttctctcgatgcgagatactccacctcacaaacttagccttcccaacacgcagcgaaatttcaatcagagccatcaccaatgcgcctattgcagcgattttcttgttgctgattcccaacaggattattctagcctgcgtatcgatcatgacggtcggaatacccacaatgacgcacatagtgcgcgtgctgagtacgtgcttcctcatgatgtagtatttggcgagttcttgaatggtcagtttgaacacaatactgccgacaacgaatccagtaactaccccagtgtctcgatcaacaattcgctgccgacataagccatggacgaagcctgtagccaaaagtgccgggactcctgaggaaatattctttacaaatgctctccagtaactcggagcacggtaacaaattgcgtttgttgctggcccagactcgggcgaaacagccgcagaccttgctgaagaccgattaatcgtagttttcaagctgttgacttttgccgcaagccgcgcgtagccttgacatgtatcttcgtagtagatcttctttacagcacgggaaataccagtgaaatagcccaaaagcgatacgttgtcgaggtagcactcaattttgtacttgaacatatggggttgggagcgggcaaagtgtgcggcaagatatccaaatccaaagttggatactatcgcccacgagaaactcacgatagaagcacggacgagtcttttcaagcaaaaccataacgtcggcatgtgatcggacgatttgatgaaccgtagcgaaagcatcaggggaagaaatgatagcagcacaaccgtacagaacgtgactccggcccacacagagttggcgactatcaactcttctcgagtctggtattgcaacgatttgctcgaggaaatatttcccagcgagtagcacgtgccggtgagccaggcgatggcgatacttcctactgcattcctcatcacaaccacttgcacacggagagcacgcccacaagttaactgaactggcgcaatggatagcttccaaggtttttggacgacgcaatctccctttttgaggtaacatgttcgcgagtgactggtgcttcgtgtcttgctgtgtgctgttgacggcgagggggcaatgttaacgctgtcggccggagcttctgcaacctgcaccataataatggtgtttgactctacctgtataaccaaatcacctggagggttggttcaaagagaaaatagcagcgaccccctaaggtaaaaatacgaatcctgaaatatactactacgtagcattactattgaggtggatgtaagtgaagtttgtggtgtcgcctcattcaagtttgggcgcgtggacgcgatagtataagatgaaaagcagttcctggaccgggtcagagagagagctgccattttcaagtgaaaaaaatggggattttggtgcggagaacgactgaggtcataacttttctttgtccctttcgagactggccaactctgagtggtgtcgaagctgttcacctccccctttttttcaggtgcagttgagggtcccttgttttcataaaatccaatagttcgagtcggttaaaagcattccgctttagaagtatcgtcagattggaattgtagtgtagggctctccaagaaaaatggttacaccaactacgtgttctgcgatcgtatttttgttcaaatagttgagcgtaatattttctttttaagtgaatattacttgtgtggactaaatgttgtctagaggaagtttggagctagactacatttggtcgacacatattttgaagtactgtattgactaaattggagctcaaagccgtgaaaggtgacgaattagttccccgagtaccaaccaatcggtgctgctcaaagtcgtggctgtcgactgcgacaatgtcacgttccccgagaactcgaacccctacgtcacgggcgaagtgatcgagtatccgtatttaaacgacgaaggctgcaactcgaaaagacgggcgatggaggggattcgcctcatgagcgagggcgagacatccggacaaccaaaactccggacaaccaaaacttgtaagacgtcatgatcgaggaggacgagcggatagtcgagcagcaccaggtcaacaaacagaagtccataccaaccatgagcgcaaacaatgctgaagcgttcgagatgctactccagcagctgcgtggcatgcttgattttccacgaacggcccgagctgcctgttccagcattctacaacggtccagttttggtcggccacccccttcttttaaagaagaagccccatgcgatcgtgcgaaaatgtcgttgggcggagtttgcacttgctgtttgtacctggcactgcaaggggctgcatttatcctgcggccagctaagacgtgacagcgtgggcctaaatcaccgccctggtcgctgaacatatcaacgtacgcaagaaaccactgcttggagctcacttagtgtgcaatattcttgcagggcatcggtcgtcacagaacctcattcaagcttttgccagctcgaagacgcctcgcccaaaggaaagcaaccatgcaggtgctccgccatcggtaccgcttcacccgagcgctcagctcgacactctacggaagcgtcgtcgtctgccaagagaccgtcaagtccgcaaccgcagcctcgtccatcgtcatgaagcaggtctccctcgagcgtatggccagcatcgtccgtgatctcccctcggacggccacatccccgacaaccccctcgtcgagatagaagtgggcgacctcattcgcaacgccgggggtcacccgaatctcgtgcactacaaggactcgttcatcgagcagcagacgctccacctcgtcatggaacactgcgccgacggcgacctgttcgactaccttggcagacggagacaacgcaccatgtcatgcatgaacgcactcaacgtgctgtcgcaggtggccacgggactcgccttcctgcacaagcatgggatcgcgcaccgcgacgtctcactcgagaacatcatgctgcatcacggtcgttgcaagatcggagacttcgggctggctacgcgcgcaaacactgcaagcggacgaagagtgggcaaggagtactacatggcgccggagatcgtcgcgggtgagacctacgacccaaaggcggctgatgtctggtcgctgggtatcgtgctcttcatcatgctcacaggttcaccgctagtgtccctcgcgtcgacgtcggtcaagtcattccgcacactgaagcaagcgggcatcaaggtggtgatgcaggcttggggcgtcgcaggcgtgtcggacagcgcgctgcagcttctgtcggggatgttggagaccgatcctaagaagcgcctgacggttgcccaggtgctcgagcacgaggccctgaatagtgattttaccacgaccaagtaacctagatttaagcggaactctgcgcggtagggcagttgagtgcgctggtccgctgttgttggatgtagagaaataaatataatagagcgttattccactggactgcttccccgagccgttcaaaaggccggtaatttcagctgaaactactactagcctacctgccgttctggtcctgatccttcccacccgttgcgccctcgcttggggggggcagcaacacgcgctgcgctcggccagctcaagtcattaacgaaatttcaaggtcgcgccaaagcaaagcactcatccccaaaaaagaccatgtgccgcaccgtagccaccttgttcacgcccccgacagatctactagcagtcctgccaccgtctgagctgtgtttcagctttccagccagcaaggcggccgcgattgaagccccgaccaagcaggaagctgttcaacggacgagtctcaagttcgtgttgagcgccgagggcattcgcttcacggacttggcgttcgtcgaagaggtcaccaagcgagtcgcggaactgaagagatcggctgcagctgccgaatcgaagagcaacaacacgctcctggcgcagaggacgctcaagttcagaagaattgagtagaatggagcgcaacagagacaacagcctccagactcaaggcgacggcaacttcgaccactacttacgactgtataagccgattgtttcgacaatctcgattaatctattcagctgttgcatttcttccatttgatatctcttgttgagcttggatttccatcaccatacgcgataccttttcatgtagtttgcgaaagatatatttctaccctaccagatcattgaatcacctcgctgactaggttgactcgctatagctcgaacagggcacgcaccctggaagttgtagtcgtatcctagcaacgaaacagcagggtgaactcttcaacgcatcaaactctttaaggcgagggactactaaccaaagtgctgaagcgaggtttggacgttgtacaataaccagaatatgaggctaatctgaataaagtcgatctgtttcttcaagacaaacgcgatgtgtttgacaggagaatgcccaagcatgcactttagcatgaagatcaacgccagcagtgagaagagctgaagcagacagtaaagcacgacattctgcaaagtgtgagcaagttggatctggtccataccgttatacacggaataaaactcgcgattcggcaggtggtacgtagcaacaagtagatatctgttggcaatcagataaataaatgaacgttagaaatgtatagcttcatttcaagacttcgtacgtacagaagacaagagggatgatgacctcaacgtagttggtaagcagtgggaacaccgccatgaataatggccgacgaactttgttcgtgtatagctcgagtgaggatgctggaggtcgtttaccagcaaaacccaacttctgagaaacttcaggccgaatccatcccaaaaatgcgaagattccgcccaagagcttcttcgctattattaaaaaatgtggcgatggaccccaacgttttgaatgtggagattctccttcattgtctccacgacgggtccgattgcaacttcttctttaagttcgatcggtcgtgggctttccgcgctacttcttccctcaacagagaaaacaggggcatccgtgaagttgcaattcctttgcatttccagcaggatacttgctctctccagactcgttggcaagcgaccacccagactgatgtacccgacagccccgacagccccactgtgactgttccagactcgattctcgtcaaccatacgctctaaagctcccacaccagcccgtgctctcccccatcatcacaacatccgcagccatgatctccaaagttgtccaaaaggacggcgagctctgcatgcaatacgaaataaaccgaagacgtcggcgttgaaaacaaccagctccggcgttgcatctcccaggtggccaaccgctcgcacaaagacattccgcatgaatagcttgatcacgggtaagagcacggtgtaagccgtctgagcgtcgctggacagcgtagtgaagatgtagaagtatggcgggtagataaaaaccagtagaatatcgcacaaccacaacttaaacatcccgaaaagcattgatgccgcattaggcgtctgccgaatcattgaattgccatcgccgttaaggtcaaactggcccacgctcccatcactatcagtgttgagaacggaagcggaaacccgatagccaccccgagtccgtaaatgatggcaaccgtgagcgtgggtacgacgaatgtgtctcagataaggcttcgagccggatatgggagtaacgagacccctgtgcggaactggtgcagcgcaagtgaggtcataacgaggtaggcgtaatattcccgcgcaaagaagagtttgttggcggacaatccagaatatggcggggagagcaccaggtcgatcgtaaaggtcactaggaggcacggtactggcgtccccaacagaacaaacgtaacgcgaatccagttcgtcttgcgcatatacttcgcgaggtctaacgcacgatccgccgagtaaaatccatgaagctccccatgccctggatattgaatggcattgataccccatttcgtatgtcgcccggtgctgcgaacaaggcaacactgtgtaccgctgtcttgtagtttagtcacaaaagtctatttcttagcagtttcacttccgagattagttctggtgaagtgcgttctatttttaattctctctcagtcgtacctctggatgcattttgtcgaagttaaagcaagcatttaagtaaatgtttgttctccggtgtttttttcgagttgggacacacattcagcctccctacgtccacaaacgatgtcagacagtatccacgctattggatctagatctgtattgctgctgcaagtcatcaccgctccattctttgaaacctgtgccaaggtgaaattatcactcgaagggcattgtattctcacaactttcggtcaagattgaatgttgagttcattttcccctatatacagttgattgggtcagggcattcattctcacaaacaataaagtacgcttcgcagaacatggtcaatgctcgatccagagcgtaacactgcattgtggtgtcagctgacgaaaggagactttcctccctgctttgcagattccacgtggatccagcagcggccgacaccagggagcagaaatcacctcaacttagtttgtcctggctttcttcgattcgcttgtagacgcgctcaagccttttccagaacgaagcataaagcgagagaatcgtacccggctggttggtgccattgagaagttcgtccagcaacccctgtcctgctccaattacagtgagggcgtattcccagctaagtgaaatcgtcagtgagatagcaccgatgccacttgcttgatttgctagccttgccagctcgtcaaccaccgtggagaccttaattcgcttctcaggctccaaaatgcacattcgagtaaccaactcccactgcccgtcctcgcacatcgctggacgagatggcaatttgccatgggtagcatgatacttcaccgcagctctgtcagcgactcgccaaggcagacaattgtgggagttgttgccagacctggctgcttctacaacgcgcagtgcctccacgatgcacataaaaagaaaacacatccgaagcaaatgttggccgtggactgccgtctccaaggcattctggagctacccactgccacgcgcctgaaatcacgggcttgtcttcggcacttgcgatcgaactgagaccgaagtccgtcactttcgccttcatgtcgctcccgatcacaatgttgttccctttcaggtctccatggaccacgccacgagcgtggagatattgaacccccaatgccgcctcatgcaactttgaccacaattcatcaggatgttcacgcagatacttgaccaaggtcccgttcgtggcgtactcgcatacgaagaacggtctcccgacgtggcaggcgccgaacaaccggatcacgtgagggtggctaaagccgaaccaaatgtccacttcgcgacggaacatcgcttgcgcttcggctctcttggcagcgtccttttgaggttgggtatgaggggtagaggacaaactcagcagggaacttgaggcgtccgtgtccgtattggagccgtcaaggatcacgcgcttcaccaccacgtccgaatccaaccacttggctcggtgcacgctgccgaagccaccttcgcccaggcaattccactcgtcaaccagcagctcgtaccaggggatgaaccactctggcgtcagttctggtgcaatatcgccatcacgcttgctagcaatctccaagagcattttctccaacccctcaacttgttcaggcgagtatgaacccagaggatttgtgatttcggctttcaacttccccaaaaacgctgaccgttcttccggcgacttcaaatcattcagaagaagaaatgcatccgatactcctgcgatgaagagctcgatgtgctcgttgagcagttgctgtcgtagcaattttgtctccatcattgaactcgtagcgcctcccagcgacttcatgagcgacctaacgcgccattgaaacgcgtacaaactgttggtcctggctcgcgttgacgatacgcgtagcattcgagcctgtccaggggcattttgattgtccgataaaaatcgaccagtagtccgtcaaatcgtgataacactgtagggtggtgcgattttccttgcagacgctcacgctgtcttgagctcgtcgaacattcggaaaaagtggacatcgttgcacttcttcatgtgtgtttgcaccctcagccacgtttcgttcaaatttccaccttcgtattcgtcgaaagaggtcaaacgctcgaatttcaggtcgttcgagctagaactctctttgagaattaattggtcaagctcatagactaccgacgacagactgacgcgcttgtgagggtcatgacagcacatacgccacaccaagtctcgtatttcagcaggaggagagccaggaggatgaccttcgtccgtctccggggcccaccgtgttctatgaaaccaggccctcgtgtcgtcttgatcgctccatggtattttccgagtcgtagcctccaaaatggtcatccccagggaatacacgtccgactcaaacgagggcagtacgccatccccaaactcaggagcctgccagcgcgcagaccccacaacaacctttgaagtaagacctgacccgttcgatctactcaagccaaagttggccaacttcgcttggccatcactgccgatcaaaatattactgcagcgtagatcgccatgaacaattcctcgctcgtggagatactcaagccccaacgccgcctcgtacaggtgcgtccacatcgtcagctttcctactgaaatcagctcgatattttcccaaagtgaccccttgctggcaaactcacagacgaagaaccgcagattggggttgacttcacactcgccgtacattttgaccacatttggatgacggaggcgcttccatagttgtacttcctgctcgaacgacgagtgagaggcgtcggggataaagagcttcacggccgcatcggcatcgagccatttggcttgaaagtcgcctccaatgctcccgtttggatagaagcgggttagctcaatttcagacggagggatggagctgctttcagacggagggctggggctgctggaagcgctgtagcacggcagattcatgctctttcgtaagtcgatacttagccccagacagcctaccgtaagacaaagcgtcttacgttttgcaatcaacgcattttggctacatcttggttttagtatactagtggctacattgtggacaacaatttgcaccatgcgattggccaaaactttcagagggtagtgtcgttgcgtgcgttcctccgttgagcatgtaggaacccgaggacaaccgctttgccgtttttgaattgctcgtgccacctacagtcgagccgacgaaataaggcgctcacaagcacgaacatgtagtcggtagtgcggccctactgccaactacaatgtacacgcttgtttgagaatggttaagaaattaatgcacccgaaccattagcccagcttgacaaacaaaacgttcagggctttatagtgaattctagttaatgcataaccaaatagagcccctcttcctccggtagtgcggcccacgaaccctgtcgtgtcctctgaggacgcctccgagcgaaacagtgcacgacgagcgcgcacacatgctccgcaccgaggcgttgtcggaggacgcgagggagtagacaatcaatacattatgggatcttaccaaagtcatgaaatgaactgttttgtagtagcaacaaggcagcgtcagccagtcttggtatttgtatttgtatttgttgcggtttgcttggctaccttactcccggaggcgcacactgctgcagctccacctacgtcggtagtggacaccaccgacctcacccgcggccacgtgtaggtaagctgttggtggtgtcgcaaacaaataactacaaaacgacgtgagggcctctaagagtcaaataagcggcgaaacttctcgggaatacatgaaaaatgccaaagctaaagtaattgatcagcccggctgaaggcttgtttgctgggcctgctactgtagtactacgaaatctaaacgatctaagctcgccgtggtgttttaaatatgtagagggagtttgttggtgtcgcagcgctcctccgcacagttctatcgaaccgccaatcattactaccactactatgctgcgcccgatattagtcaggatacgaagtgcaacgaaatgcatcaaaaagagtagcgaagaggaacgcgggccttcctagctagagttggtcaaatccttatccagttattaccagttaccgttattaccttcgtacttaccatttattaacgttaataacttttatgtatagttggtgtggcagaaatattcgatctgctaacggtaatacctcatgtgtatagttggtgtggcagaaatattcggtcaacgcgtttcgtgaagttgtcaacgtacgtggaggtctaccgacatgaatctgcgtatgctccacgtggcaggcagctcgcgcacggggcctattctcgtcgctgcattcacaaacttgctcctgtagagcctgcaagctccatggaccaaaacggccaccgcaacgaggaccgggctagcagtgaaggtctggccttggtcgcccttcagttggcgtgttgaccgagtacattgtggttgtgccacgttgggccaacccgaagaagcagcaccgcgacgtgacgtgcaggcactgctccaagctcatcaagaatgcccagcccaagaaaaacctccgcccacacattcgcagctgtccctgcgccccagcggacgtccgggctaattaccctgtaacaccctccaagcgagatcgtcccgaaacttccgataggccccacagtccatccaagcgttcgcggcctaaaatggctacgagtgtgctaggatcggtctcagtgactgaaaagaaggagttccatcttcagattgccaaagcgttctatgcctgcggcattccgtttcgagtcatcgaaaacggagccatgaggtgtatcctgacgaagtaccggcccggaatgacgctcccttcacgccaagatttggcgacctcactgcttgacagcgcgtacgcggaggaagttgccagcgttatggaggtgctgagggagcagcagtacgttgccattttatgcgacggatggtccgatcccaacagcgagtccattatcaactttatggtgacgtctccatttatccgacccatattttggtcatcggagcgctgcgccgacagacagcatacaggggagttcatcgcgtcagagttgaaaaaggtgattcaagctgttgaaaatgtcgtcggaaaaggatcggtatgcgctgttgggacggacaacgcgtctaacaggcgtaagtcatgggagcttctaatggccaagataccaagtctaacgtgtaacggctgcgcggcacacacgatcaatcttctactcaaagacatgttcgggatggagttcatgagtgacgtcttcaagaaagccgtcctagttaccaaatttgtgcgtaaacgtgcagcgcttctttatcgctttcgggctctgcaacgcaagtattttggtacccggcagcactggaaatacaatttgtgctcgagtaccaccgcgtcgagcgcgcgctaatcatccctgtttcgacgcggtggtactcgagcacaaattgtatttccagtgtcgtgaggaacgaagatgtgctgcgtgagttgttttccaaccatgaatttctggctcgttacgtagatgctgctgccaaactcaatcgcgtcgagtctatttcggctgatagcatgttttgggtgaatgccagagccgtaatgcgactggtgaacccgataatccaagctctcggcgctctcgaaaaggatgggtgttgcctttcgatggtgtatgaatactttcgtggactgaaaacccacgtcatctacaaccgcgaaactgatgatgttgcttctggtattcttaacacgatccgaggccagattagctcccgcttgaacaccctcaagcgcgaatcaatcctcgctgcatttttactggacccaactaagtctacggacgactttgaaggtgatgatttggacaatgcagtcgatgcatgcgtagatctagctacacgagttggtctaccctccaacgtatcttcaaatgcggttcgccgagctgtcatggcttttattcgcgtgaagaagtcctggacagccgaagaccacgaaaaaaacgcgagggacacgccattagactggtggctggtcaaggttaacaagtttccgctcctacatgctttggctacccgcgttttgagcatcccgacgtcgtccgctgcgagtgagcgctcgtggagtgttcgctccttcatccgcaccaagcgacgaaatcggctgaaacccgatcgcgtggaaaagctagcatatttgtactcgaatgcgggtgacaaggctgcaactagtgcagtgcactatcaagtcaatgcagaagaagagggcgaaagcagcgcgagtgacgactccagcgatgatgacatcgttacgccaattgctcccaacagctccagtcgcatgcgcggtagtcggtctaatacggcgcaccgatcacgattcttcacgccctcgcagaccgaccaacgtgaagctgtcccacccccgctagctcgaagaacactattttcgcctgcactagccaacccgctacccgaccaagcgacgaataccagcacagtatgcagtgacgaggctgcggtcgctcttacgcagtcggtcgctcttacgcagtcggtcgctcctacgcagtcagtcgcacttacgcagtcaacaagcagcggaaccgttttcacgcgtgctgatgagcgccagcttgtgccaccggtcgtgaggccgcccggatcggcaagtgcaacaacaccgagtctaccaactagcgatcgtctcgtattttcagggggtagcagcggccgtcgtggactacctccaactccacagtcgagcactggacgcacccaccactcgccgagggtgctgtttggtccaacctgggagcattagcatatttgactttgttcacgctagctacgcccgcaacatgatccatattttcattccgttcacgccttcttgattacatatcatgcactagttagtcaatagagtcgtcgtccccacgcaaatgtgtatcaatgcattggcttcaacctctttcgaatttcttctagatgctgcctcggctgatggtatttctagcagcttcctccgcttcattttctcgtgaggagttttggttctgctgcggacttgggtagttgttcatgataggggtagacttgatggtacttgccggacgtgacggcatattcgtcgtcgcgctactcgaaccttgatcactcatgcacgcagccgaggatgttcgatttgctcttgccggcctcgccaccctgtttcagcgcgcacacaacctttctgtgcttgtgcgtggtgaagctgcgtatggacccgtggccatggcggtcgcagaacactttggtgaccttagtggtggcgaacttgctaggggtgaaggagaggtggagggctaaaccgcttttgccctgactaatccgagttcaaataatgcaaacgccagctcttcttgctcttcttataatcgtagagcttcacatcagttagctcacagattcagtgcatcgtgccgtaccagccgaaacaggttgcccttctacgagatgacctcaacttgaacttctgtcactgagctgccagcgcaacggcgcacattggtacagcagaacgcgcactagcactcccacaaaaaagaagcgtcatatttggttaagaatgcagtaataatgtaacatcaacgcttgtagcgcaacatttaggcctcgtccaacccttatcagcgagctgttcgttcatgtaacagcataatggccacctcggcgatgtatatgatactcttcaagcccttccctctcttacgaatctgcagcacaacacacaaactcatgagatccactatatccagctacacgctctcccaccggcacttacttcatttttgatgaatccctcggccagcaggcacgtgacgtagtccacgtactgatggctaggcccgccctgcaggagataggtgttgttggtgctggactccgtagtgccaaagaactcgcaggtcctgtcgctcagcagtgaagcatcggcctcgtccgtcgtgaaacgcacgccgcacctgttctccttgggcaccatgtcgccttgtccgaagcaactgccggccgcaacggtgtacaactcgggtgacgcgccaatgatgtagacgcccacaccggcggcacggagcgcgtgcatggctgacttctggccactgaagaagcgcaggtccttggtgaacgagccgtcggcctgcaggtcgcccgccgacgtatacatggggtccgcgagggccaggccgagcatcatggtttcggtctccgtcatgtccgcgtgaagagatcttctgtaagtagtctgagtggccttgtcgcagtccatcgtctcgggccgaaaagcagaagtgcaggtacacgatggcttccttgatgacatccagcgggcgtttgactactgcgttgcggaaccgttgctgatcagcttgaatgttgggcgatgtacgcgtcgtagagcaccttgggcctatttttgcgagccccgtggccagcgtggcgtcggcgccgttcacgttctggccgagcaacgagctggtgccgagcgacgcgtagatctaggggagagattccagcctgggaccggagaacgcaccgcgcgcgtgcaggctagcattgtgtgggaagctgatatgagcaaaagcttgctcttccagaagttaaaatgcttaagacaatatttaagtattacgatacacaaatgatacacaaaggtaatattatcgttattaaatgcctaaaattactaataccagttattaagagttattaacttggtaagaaacaacacagagcctgcgagcactctgcgcctggcagtgccaacagaattggcaagtcgtactattcgccaatcaaatcactagatttgatttgtcgtcaaactgtcttacgaatgctcgacacaagtgaatgtcgcttgttgatgtgccatcactgcatggtagacaggtgcgaggccagcgcaataaaactcggaggccggctgtccaacgtagaagtcgatgcgagcttgatggttgaacgggaggtagagcgatcaagggcgtgagtatccgttgaatttcaagatatccgtgatgagcggcaacgcgcacagcggtgtctccgtccttgtccctggcattcgcgtctgcaccgcagtccaacaggtactgaaccacatcaacatggccatacgcagccgcctggatcagcgctgtctctttacgtttgctcttggcattcacatctgcaccgcagccctcagcgaggtacctcgcgatgtcgagatgaccacgttccgcggccttcatcagcgccgtgtagtcatgtcggtcctgcacatgtgcgtccgcgttgaactcttctacgaggcacatcacaatggcaatgtagccatattccgcggccttcaacagcgctgtcggttccgggcggtccttcgatttcgcctctgagtcgcggcctttaccagcaagaaggcggacgacttgaatttgaccaaactgagctgctgtggccagcgctttatcttggtttttcttcttggagctggtatcggcgctggcgaggtactgcaccacgtcgacgtggccatttcgagcggcccacgtcagcgctgaaggtttgaaccgagtcttggggttcaagtccgctccacagatctccacgaggtacttcacgacgtccgtgtgtccttttgccgcggccttcatcagtgccgtgtcttggctgctgtttgtggcgttgacatctgcaccacagtggccagcgaggtattccaccaggtggatttggccagtttgagccgcctgcatcagcgttgtgtacccgaattcgtccttggcattgacatcaacgctgcattcctcgacgagatactgcaccaactccagctggccgtacacagcggcctccctcagagtttcttccggatccacactcatggttggcagcaaacgccttcgctactgcgggtccaaacgaagagtgaggcgtaaagacagtggttctgcagcccactgactttgactcgatggctacataaatcaatagcgcagacacttcaacacccattgagcccgacctcaaagtcgagctcatgcaatcgaaacgcaggagcctctgcgcaagagctggaggggggtgaggtcaacctccgcttcatcgtgcccgtgcggcatgttcgagagatgaaatcggacggcacgcacgtggacaagtactcgattgctatcgccgatacggactccaacgtaagaaacggagccgctaaagggccaccgcagtgggcccccatcactataacgaagaaaaatgaggctacagtcgtcgaagagtgagctaggagtctgagtgagatgcacggccgaaagactggattcatttattagaggaatcgcgacttgttttgagtttgatgatattacgagatacctgaaagcttttgtttattagtaactcacgattctgccttctgcgccaaactcccgtctggactgatgagtgagtgctcaaacacccacgcaacgtcgtccagcccccccccccccagaatctccagcattggcgtcaatatgtctgcgttgcagcgcagactcagcacgcgggcgctttcaccgtcccagacgatgtgagcggataacaaggcgcttccctagtagcttggagcccagagtagcccataactcttggtcgatcaccaagtgggggaacgccattcgaagtgtgctctcaaagatcgtggccttgactttggtcgtagcgatgaacgtgtctccaagcccgttctccaagttgacaagttggacatcaaaatccgggaagtagagcgacatgcgtcggtagtcttccagtagtgcctctacgccccgtcctgacgaggtgaccacgtctggagccatcgtcgccaccagaaatgagcgatgcacctgcaaatgctgtgggtgcagagcctccaagctactacaggagcttcgcctcatcgctggttccttgagggcgcagcggaactccaggtttccgttgaaggacggagaccagttttccgtagaacggtaggcaggaatccacggagatatttcccgaagttcaagccgcagtgcagcatctcaagcggcgggcacgtctgcatcgtcgcatgcatgctcaagatagctaggtaggcttcgtagacaagatagcagctcattcacagacttgcctcctcggtgacaaaggtcgcccacgcaccacacccaggggctgctccagccctatcacagcactggagcgtcttgatcacgtcttgaatgagttgcagcccccaagccggacgtgagagcggaaaaggcggaagtattccgacaccacgttccacgaggttctcgccgtcgagatgccgaagtcgagcaactgccgctgcagctcaagcttgtaggtctcctctcgcagcgatcgaatgccagagacgcggccggacatcttcctttgatagcgcgtcatgttctcgcggctctgctggcgtcgacgtagcaatgagcgctcagcaaagcccagcgagctcgacgcatctttgccggccctaacgatagtagagtgctggggtggacgggccgttagttccgctgtagtgcgtgcatgaagcggcctgttgccgagccgagtcggtgaattcagtctcaccttaacggggacatgcctgcgagtgttgtatcgatcgtggcaggaaaactcgacacgttgggtggcaccttggatgacttcatcgcttaacgactgggagttaggagggtagagcacgctggtgttcatcgtggctgaagaagaaatagctgcctgtcgttgtgttgctgttgctgtgagaattgaagaatgcgtcgattgggactaactaaacgcgcaacgcacactgaattcgccaacagatgcatctatgctaatgtacgtatacgccatggccaaccatgacggtaccagcaagacggtgctctcatcaccgatcgcgttagctctgtcagcacgcggcgcaaatggagattttggaaggagccgaaggcgcatttgaaaatggggttctcggcgaggagagatcaagtcagttcctatcatggaccaagctctcgaagtcaactaggtgtgtattattaggtgcctggttttcttcacagaacggctccgtatgcatgcggcatccggtggcgagggttttcccacgctaggaatagtgtagcgatagataggagcagtaccattcactctttcgaggcgtgaccagcaagtccacgattcccaacgacaccttcgcagaaggtcacgctagcgtttgacgagcaacatgcaagcaagtcctgagtcgacggccatgatggatagggcagatgcagtccatccggcggacggttcgctccgctctaagtgatcatcctccacgtcgaacggaccgatcgctgtcacaagtcctactgctgggttcgctcacaattgagaaaggcccatgtacctgcttcgtcgcgctcacgctcgttccttcactgctcctactttttggggctactcgcgctcccgtaacgaagcaacgcgagcgtgtcgaagagtggatccacacacagggctccaattgatggcttgatccacggtgaagcaaccgcgtcgagggaggcgaacctcaccatggctgggtacatcatcccaagcgagaacatcttctaccgtctggcaaccatggaccaactttgggctccgatcggtggttcgatccacggtgaagcagccgcgaggggaggccgatgtcacgaaggccgggtacctcatcccaagcgagagcgttttctaccgtctggtaaaccacggaccaacctgttgtgtgccgaagtgcgagtcatgtaagtgcgtgaagtactcgtactactaactcctttttcagcgtcttctatcttttaggcattcgtcacagtacatccacatccaagcctcaatggggctggcctcgttggccctcgactcggaccgacgccgcgacgacaactccgcgcgtcgacgtccctcgtctcggccctccaagaccgaggcattattgtgaatgtactgccaattgatctcgacgagtggagaatacacgattgcgttagattgggttataagaaatcgcagatccattccgtttggtcacctgtgctgtgtggaatgtcatatgcagcccgctaactcgtacagagtggtccactgcagctacgtctcagtggctgttatgacgttacaataccaaaaacgcattcctgctttcgtagccagaagcttgcttttgcacgacatattactgtatgtggtaaagtggccttctatttgagcttaattcactgacctatagaagcctgatatgtagtgagacgtgtctgtatgtcgaccgtctttgagtattttgttgcttttgcagctgcggtgtggagtctgcaatcgttttccttgtcatggagttggggatcaaagctccgtatcgtagatgatcgtagtgcttgtttttgccgtcaacttagacgctcggagcgcggttccaacgggtgtaccccactgtgctgagaaaatagcgcccaagtccttggcaagtgcggctgctggacccgtttttgattgttggccttgagttgttgggactgcacttgtagtttcttgtcgaggccatcaatgcggagatatgttgagcccggggttgtcatcgcactgagctctgtcaatccttggttcagcgttcgtgctgcggcttccgttggagtatttgttggcccaatgtagggacttcctgcttttctgggaatccactgtggagcagccgtctggtgatagaggacccatcctcccgtggtcaacttgtcctcagtggtgtgcgtgctgaagtggatgttccagacgtcgaggcttggaacttcatcgtcttcgtccagcgccatcatactgctgtttccgatttcaagacataagccttgaattcgctttgccggttgttgtttccatgcactagcaatcgctcgtgcctggtagtctcctgcagtcttgatggccgcccttgtctctctttcgttggttattttctccttgaattttgcgtcattgcgaagcctccagagtaaagctggtgtcacagttgcccatattcgccacaaaaacttcatcgcgtccgtgtgatgaggggtccaccgaccaatacatagttgagctgtcgccaagtaagcactctggagtggcggtgctgtcctggatgctgctgccgcacgcaggtctgctttttgagatggttggattttgtatcccatccacttgttgatccaagacagccatgccgtctccgcttttctgcagtcccacaaaatgtggtcgattgtttcggtgaggcattggcagtccgggtcagggcgggctctatcgtgaggccacccgctgtggcgaaggtttagacgtattactgtatgatatagcgaacgaaagataacacacttgttcagcacatggcggtagggaatacagtcacacctctataaatgacacccagttcgctcggtctaatacgctgtttcagttaaagaattgatcagataaagaaatggctacacttctaatggctacattttcatatgttaggtgcaccatacaagggctgtctttacctggtacccctccagcatttgttagagtggccagcttggactcgagctgaagggttggctatctgactgatagcgatcaagggttgacgtttagttgaccctcatctcccagctctctaacgtaaatgaatcactttccaattctccaacagcattttcgtgctcttgttttgtttcgtcttcatacaaacagaactcaaccaataacggtaggcgcggtattgtctgttcctactccttcttctcattggtattagcagaatcgcatcccctcaggacctgaggctcaggttgtacgtgagtttcaatacagtgaggttataggaatatttgttgtcccgatatcctgccaccatgcctgcagttttatcttttgcttggtatctactgcataacccctatagttgtctcgacatcataatattttagtttttcgtaaaaatatatgtataaaatactgtggctagcttctttatcagtatttacaagcttgcagttactgcaaactctttgttccaacttagcatcccaaatacaatttctctcttcgctcgatttgttgtggcgggggtagtggtagcaatggcatacgtgggaggaggcaggcaagtgattgagaaatatatatgagtttggatctattactacggcgtccatttagagggttgaggcgccaacaatggcgaccatttagagaataaagaggtttttgatcagttatagagcacctatagtgaaatccatataatcccgtttgcagtcgaggaatcctaaccagatagggaacacatagccagttagaggggttcatttagggaggtgtcactgtatgacaggtgtaccagtttagtggtctctcccgtaggtgtagccgatcggacattaaaattcccctgcgcaaacagctcgagattccgtcagcaatagctagctatttcatcatcctcgtccatccgtggttgtacaccagcttacccagctggatacccttgtctttctcttcccaataattgtttctagagtgcgttgggatcacgtagtcgcgcggcacgtggtgatttccagtcctcatcttgtagttggccagcattggtttgacgcgcgctttccacttgtcagccgggatctccaggtcaaatttcatcgcctccaactcgtccatcgctttgctcgcgcagtttggtcgaaatagttttcacggctacgaatattctgcacgacgatggcaacagcaagtgatcccacttgtattgatataagtcccaggcgaagctcatcttctcccgatccaagtattggtacagcttgattttgctttcatccttcctcttccacttgcggaactaacgggcgtgtctgtccaggggatatccacccgctgctttgcgccacgctttgtcttcctcggggacgcagaactctatgggggccatcaggtgtttctctttctctttctctttgaacgcggggaacgacggcttgaccatttcctgccacttctttatatcgtataacgagttgaacaaagtgtgtcgtcacttatcgtcgcctgtagcatggtttcgcaaggatgctctcttgatcgggggttaaggaggagaagcagcgaggcctgtcatagctgcactgggagcaggcggacaggcggacaggcgagaggcgtggggacgagtagcgcccatgcgcacaaggcgtctacgcgtcgacaacccccttgaaatgttcttcttcttggcggacttgaagcatatcattgtacacagggatttttggcgagacccaaatcattgataaggaatcagatggaactgtacggttttgtcagccctgcgcccttgcgatgaacttgggaagtagctgtctgtgagtgtgagctcgtgccagggaagaactactagcacttactgtacatggcgcgccggaggtgctgtgtggagacaaatatgacaccggcaaggcaggtgtaatgggccccatttacataagtaggtagattgacagtacataaagtagttaagttagtacacgatgagcctgtactgacggtcatcgtgattgctgaattgggggatccagaccccatttcgttgacctgcatttgagtggctcacatgagaccaggggtagccgccctggtccttacataaaacagagttgattttacccaagactgactgcttgatctcactaaatccgagtcttaactaagcttcctcaccgctacgtgtaagctagtaacggacacacacctgggccgttacacctggtagcacttcgtagtctttccaacgaccaagaccaagatgagccaagtcctgacgtccggactttcaggagcaaccctggagcatggtgccttcccccatctcacgcggattgagtgggaagctctccaccgcctcgcgcggtgtccggagaagctgttgtcacctcgctgctgagctcagcgatgccggaacaacagcgccaagctgcccaagaattcatggaacgcgagctcgccgacgcgaatcggcgggtcacaactccctcgcgctcctcgaggaacgacgtcgtcaaactggagatatcgacatactccggtgtgggtgacgaccggcttccgctgaaccgctggttccgcgagatcgacatcgctatcgcctcgcgcatgattgaagcgccggcggccaaggtcaacttcctactctcccggctgtccgggaaggccaaggagtgggccctcggcaagctcgtcgtcgaccagcacgcgttccccaccttggatgcgctccagagtgacctccggctcgcgttcgagccgccccaagacgagtcgcgcgttcgtgctgagttcttcgcccgcaaacaaggcaagatgtccatacgcgactacgttcagaagacacgacaccttgcgtcgtgcattgtcacccaccccattgacatggcatctcaggtacatgtctttgtgttcgggatgcgcgaaggcatgacgcggtactgtctcacgagagccgaaccctccccgctcgaggaggcattcgccctcgcgctccgcgaggactacgtggtggcggcatcgtacgcgcgcgctatgccggacgtctctcgggtatccgcacccgagcccatggagatcgacgcaattgaggcgtcgggtgatcgacggcgctcggcttatggtgggggaggaggtcggagcgctcgtcctctgacttgcttccgctgccggaagattggacatcgcgcagcagagtgccgcgcgccagccccagttctcgcgcacgtcgatgccgacgctagcccggccgcccaaccaaaaaacggccggggccagttggtgcggggcaccctactggttggaacgaaggtccgggtcctccggtggcaacccggccttctagccctcccgtgctatatgcacgttttaatgccacctctacgagtggcgactcgaggctgattatcgtcagcctccatgtcgccggcgcccgacgtccactgcgcgcgctccttgactcaggagcgacaaacaacttcttccgcgcgtcgtatctatcggtgcttcttgcgagcgttcgcgtccggaagggtccgggcgaggtggaagtcaagcttgcggatggcaaggcccaccgcggcgcgcgacgcgaggtgtccctgccgtacacgttcgacggcttccgcagcaacgacgacttcctggtgatcgagatgaattacgtgttcgactgcattctggtgatcccgtggcttgcacgatatcagccagagattgactggcttgctcggtcagtcaagcgtcgacgtggcttcgacgtaggtgagtgttcacgtatctcttggtggctccaagagactggcctcacgttaccgtcatggacaagacagccacgacgcaagttgtgcacagagcgagcgatggccctctctggatggcatgtgccgtgctgttggatgatgatgatgatgatgatgtccggatgacatcgcatgggcgcgatgacggacgcgtggtcgagcgacgtgcgctcccacacagtgagaacaagtcggcggtcgagcatgggttcccgtcgagcaacgagtcgacggtcgagcatgagttcccgtcgagcaacgagtcgacggtcgagcatgggttcccgtcgcacaatgagacggcggtcgagcgtgggttcccgtcgcgcaatgagacggcggtcgagtgtgggttccagtcacaagttgagcaggcagtcgagcacgagtcgctcccgcacaacgatgttgcggctgagagcgtgatgcagccgcgtaccgccggtgtgatcgagcgtggcctcccacacctagaggagggtgaatcatcgttgagcgagagcgatgcgtcttcttcgagcacccgctcgaagcgaaagaagaagtccaagcgacgccgcctgaagtcccgacgagaaccgtcagtgactgagaacccaccgaaggagtcggtgtgcgctctcgtgtacgtggagagcgctccacgacgatcgcgcgtcatcgaagtcgcgagtccgcctcgcgatgccaacacaatcaggcgtctctcaggactctcctggaagaacttcctgcgagacctgaaggcaggcgagatcgagcaagtgtgtctgatcaccgaagcggtcccggtggatacgctacacgcggtcaaggtcgaggatgcgccgtcgaggcccaagcacaccgagcccaagtcagcgcgcgaggagcgcttcgtggcgcagtcctgggaagctctgcgtgagtccgataaccccgtgtacgaaactgcccgcgagtacgcggacatcttccccgacaagatccccgctgagctcccggccgaccgaggcgtgcgccacgagatcgacctcgcgcctgggacgaagtactgcgtgacgcggcagaggccacttccacgtgaccgggtgaaggccatcgacgacttcttcgagagccgccgccgggcaggtcacgtgcgcgaaagcatctcgccacactccagcccgaccttttgcgtcaagacggcaacgggcgggtggcgcattgttcactcgttcaacaagctgaacgatgccaccatacccgcgcagacgccaatcccgagcaaggacatggtgctggactctatggcgggaagcgtgatctacagcgccatcgatctgaccgatgggttctaccagatactcatgcgagagtgtgacatacctctcacagcagtaagcactccgagcggcatgctctgggagtggctggtgatgccccaaggtctgaagaacgcgccggccacgtttacccgcatggtctcccatgtgctgcgcccgctccgtgacttcgcaccgagctacttcgatgatatcttcgtgcacagtcgcgccgaaggtgacctcagcgctgtcgaagtccgcctgaagcacctgcaaacaagtcttccaggtgatgagggagaacaagctctacgccaacttgaagaagtgcgtgttctgcgcaccggagatcccggtgtttggctgctacgtgagcaaggacggagtccgcgccgaccctgagaaggttgagtcaatctgctcttggccgaccctcacgagtcccactgagcttcgtcagtggctgggcatgccgaactacttgcacaagtgcaccaaggactacgagaagtcaatccagccactgtcgtcgctgctgaagaaggacaccacgtggtcgtggcgagaagagcaccaagccgcatttgactcggtgaagaggagtctgtaatccgcccctgctttgatgctcgcggacgattcgaagtcattccacgtcgtctgcgacgcgagcgactttgccatggggtgtgccctgatgcagttcgacgacggggtcgtgagcgggtgatcagttaccagttccgccagctcaagccggcagagaggaactacccagtgcacgacaaggatctcctcgccatgagctacgcattggtcaagttcagggtctacctgctcggagagcagacgtttgcggtctacaccaaccatgcatcgctgcgacctgcgatgaaatccccgcatctgtcccaacgtatgacccgctggttgtctttcttctccgagtacaacttcgtggtgcactacaagcctggcaagaacaatatcctcgccgacgcgctctctcggcgtccagactacgacccacgtaaaggcctcgagcgccaggcaactgatgaagatgatgaagacgcgtgtgcgacgtgtgtgacgtcggagttgaacctgacaagcgtcgcccccaagatgccgcttcgggacgagatcgccgcagcgtacgagcagtacgccagcatcctggcccacctccgctctccaagcgaggcgacattgaaggctctgtcgcgctcgacccgcagccacgtcgagcgatatcggcttgatggctccctgctgacatacaccatcgaccagctcgatgccccgagagtggtggtgccgaatgacgaacaccttcgcgcccggatcatccatgagtaccacgatgctccgatcgggggtcacttgggacgcgaaaagaccttcgcggcggtggcgcgagacttcttctggccccacttgtacaagtgggtgcgcaagtgggtgtgcacttgcgagatctaccagcgagtaaagccctcgccgtcgtcacaggctccgctgcgtccccttccggtccccacgtaggcctggcgcttcgtctcgatggacttcgtcttcggtcttccacccgactcgaacgggcgcactggagtcctcgttttcgtcgacaggttcagcaagatggtgaatctcgttcccgtggctgccacggttactggggaagagtccgcagcccacttcgtcgacgccgtcttccgtcttcatggtctgcccgattccatcgtctcggatcgggatccgaggttcacgtccgcgttttggacggagctgttcaagttgcttggaacgaagctgccgatgtccaccgcggctcacccggagacggatggacaaaccgaacgcgtcaaccgcgtcgtcgaagacgtgctccgcagctacgctatgtcgttcacgagctggagcgctttcctacccctgaccgagttcgctctgaacaacgccgagcactcgtcgacgggcatgactccgttcttcgtgaactccgcccgccacccgcgcgtacccgccatgcttgccgtaggccaacccacggaggctcgtgtctctatgcttggcgggggaggagctaccgctgaagactttccgccgaccgagatgccggcggagccgtcgccggtcaattcacaggcgtcgccacgcttcccagtgaccgaatcaagcgcaaatgcagtgacacgatcccaagtgaagaaggcccttgccgcaccgcatcgagcggtgacgccgctcgcagactggacagagcgaactctgatcgaccccgctggcgctccagcgacgatgcagcaaccagctactaccgtcaactatgcaccgaagtcctcggcgagtcccacggatcacttggcggtttccgagtttgtgcagcgtcaagcaatcacacgtttcgtgcgagacgcactacaagccgcagtggaccggcagaaggaaaatgcagacgagcgtggacgcaagaacatgacttcatttcgcgcgggtgaccgtgggttactgtctaccgaaggcatccgctcctccgccgtgaccaacctcggtgccaacaagctcgcgccgcgcttcatcggcccgttcaaggtgatcaaggtcctcggcgacgcgtacacactggacatcccgtcgtcgctacgtcttcacccgactttctacgttgggcgcctcaagcgatatcttcctgccgatattcctacctctgatcaccaggattcactggcgggtaatgtacccgaggctactcgcgacgccaacacccatcacccaagcctgtaccgtcgcgatggtcctcctccgattgtcgacttggcgggtgaagcgtgctggattgtggaccgcatcgttcaccacgaggacccatctcgtgcaaacgggcgtgggcgtaatccagtccgagctcttcgtgcgatcccagccgcgcgacgttaccgagtagtttccacctgacgaggacacgtgggagacgcgtgcagctattcttcgggatgtccccgatgttgtccgtgactatgaggcgaaggtcgctgttcctgaagagaccatggagctccccgcggaagctgaagccttaactgaccgtgatgatggaagtggacccccaccactagctcgcggtggcgttcaccgcgaagactaagaagaaaacccgacgacgaccgccggactcgaaccggtgacctccaccttggtggcacagcgttcgaccactgcgctagctggacttcgagttcccacggcgacgcgcgcgacctgatcaagcttggagcgactgcgcatggcaagtggcaagaaggattcgcgtggggtcgaacccacgagtcacagctcagcacagtgagcgcttgcccactacgccgctccaccgatgatcgccggtgtcgaagatgtccaagctggtctcgctgccacgtcggttcgagtcgacggttacgcgactcttcgtcgggagttacttcgaaggatcgtcgcgaagagctacgccacgctgatcgccatcctgtgtatcgacactcgccgggtctccgctctgtgcgcatcacagttgcgcttttcgtcaagcgttggcgtcgcttcccatgctgcgtcgttgcgacgaccgccgttccttcgggtgtccgtggatgtccgcagccacttggggagctacgcgttgcttcggtgtgtgcgccgacgagatgtcttggtgtgtgtaagcttgctgcgcctgcgtcgtcctgtgtcgctcggtagcacgagcgccgtccctccgccgcctcggtcgtccatggtgttcttcgggtgttcattcggaaatgtgtcttttgcacttacgttgcgtaagcgcaactttgagagggggttatgtaatgcgccccatttacataagtaggtagattgacagtacataaagtagttaagtcagtacacgattagcgtgtactgacggtcatcgtgattgctgaattgggggatccagaccccatttcgttgacctgcatttgagtggctcacatgagaccaggggtagccgccctggtccttacataaaacagagttgattttacccaagaatgactgcttggtctcactaaatccgagtattaaccaagcttcctcaccgctacgtgtaagctagtaacggacacacacctggcccgttacagcaggcatctccgatagctggttcattttgctcacattcgtgccaaattacacccagcatccattcaagacaacatttctcggactcgagcagtgtggagtcgtggatagtgtaatagaccgttgccggcacccgttggcgcactcattcgacactgactgtcgatccagctaaccgtaaggcaaatcatcagttccatggccacgagcagtttattggccatcactgtttctaccaatcctgacgatgtagccatctttttctagatatgatttgccaaaataaaaacagccgatttcaagtgaaatcctcagtgacttgatattcaagctgtgcacgggaggaccaaccagccacacaccgcgcgtcaacagtgctcggaagagctcttccttctctttcctgctgccccgcagcatttttcgtcgtacgtatataccctggcataggtatgtggtgggtagcgtttggcattgtttatgacaccgctcgcaagtaagtcggccggtcgggcaccatatcagtgtgtggacgactccgtagagaagcttcctgcagggccctatcactaactctgctgcaaaatgcacccaaagagacgagcgctgaatattggtagggcaggctagaaggcgtggcagtcgcgtcctctaactatcgcattgcggtgctgcgcttgtcgctagcctcagacaggtaaagctacctattaataatgcgtgtcctattggtatactagtagacaagcagcaattcatctactcaggagcccttacgttagtagacgcctgcactgagatataaggggtgaggcgtcatgagctcgtgagcctttaggagtagcctttagaaaccatgctccgcgagctccgccgagcatggcgacagcggagggtggaagggatctggagcaagtaatacaccaacaaagtggtcagcttacgaagttatgagggaagagaggttttataaccctaccctcagtggtaccgagcgtgatcagacgagatcccacacatagttaaatcaagtctaagttggccattaaactgattagaggctgaatccgatgcacagagaactccggctaaactggcgccgggtataagagaaaatcgactaatagagcgtttctgcgatatcccaaattctgactatagtaaaagcaagtcaaaccggctattagactgtaagagtgtaagagagctcccccaccaaaccaaaaccacacattgtaagaagagtgggggacacgtggcccacttttaaacacgatcaagagcgcaatattggtctcgtcacgtcagcacctcactatctacgaaaagaacgagctccgccggtatcatcaggcgcaccccagtctcaagcacgtcgatctccagcagtgggtcgccgtacgcctcaacaaaaggattggcctgtcgacagtggggaaaattgtcagccagccacttgactgcactcccaatgggaaccttaaaaagaaacgcaagtcgcaccatgcgtctattgaagacaagctgatggagttcgtgcatgctcaagaatccaagggtctcctctcggacgaggtgctacgaacaaaggcaaatgaactcgtcggagaggggacaatttccctgtcgtggattcaacggttcaagtttcgtcatcgtgtgacgctacacaatatgcatggggaggctggatcggttgacacggcggacctcggccagcaacgcgcaaagttaatggagctactcgacaaatacaacccccaagatattttcaatatggacgagacagctctgttttaccgtatgctaccaagtcaaacgctagcgaccaagtccgttgcaggcaaaaagaaggacaagactcgaattagtatcggactatgctgcaacttggcaggtactgaaaaattggagcccatcgtgatcaatcgagctgcgaaacctcgctgcttcaaaggtgtcaacgttggtgcgatccctatggactatttttcgaaccaaaaagcatggatgcattctgaagtgtttttgaagtgggtgcgggcgctaaatctcaagatgcatggacgcagaatacttttggtactcgacaacgctgccggtcatgttgacattgaactgaacaatgtgtacatccatttcctaccaaaaaatactacgtcgcacctgcaaccaatggacgccggcattattcgaaacttcaagctgaagtacaagaaattatttgtgcagtgggtgattgagcagaccggtccacagaagcggttagatttgttgacggcaataaaatttgtcgtggacgcatggaacgcggtttcggatgcgacaattcggcggtatactaggttgtgtcaggaagcatgagcgctaggattgagcgcgacagtgagccgatgacaagagaaacggagctggaagatctagaagcgctgatatctagattagatctattggatccattgagtgtggcacgctacgttgacgttgaagatgctgttgacgatagcccacacagcgacgacgcaagcgagcaagtttcaagtgacagtgagagtgattgtggtggtgaggaggaacgaccgttttcgcacagcgaggcactagatgcagctcaaaagcttcaggtctacatgtttgctcacggattacaggacaccagtgtacagaacgttgtcaatgcgacgaggagaatggcgattatctctaagcgccagacgtcgatcacctcgtacttccatgctttatagtagtttaaatgttcaataggtaggttccctcttataacagcaaaactctataagagagcttgtgaagttgatggccaaacacctccactataaccggggttctctgtaccgcgaactcgtccgtccagacaactcaaaacagcagcactcaccaacaacacggttaatcgttgacccccccccccactcaaaacagcagcactccgaacacaaaaactctcaaaagtcggtctgtgtctcctcttacaatggtgcaactagcttctcaatccgacaattatgtagttttgaagttacgaccatttttctgcatgccttgccggatggacattaaactgctgctttgccttactgctctcagtagtcttatatctccccgcaatcgcgggacgagattgggacgagttcggttattgccaggacctccggcaccctggcagtgtgttcgagatgcagtccgatacatttgcctttcaattttatgtatcccgcggcccgcgccacacaacatcccagagggacaagagggggtgtcgtccctaaagcgtcccgcttcgacccgcaacaaagagctctgattggtcccatcccgcatcccgcgagatacaagactgggcctcaggcttgctttgcttgcgtggtcagtgtttttatccggatggatgccagtcatccggataaaagcgcagttgtcaagttgaagagcttcacaatcgtcgaggacggttttacatccaccaaaaccgtctgcttccaaacaccgcgcgattgtaaacacatcgcaaccactcgtgtcctgcagcaaagagagaacgcggtgccagcagcgccgcccgctcaacgttgccccaaggcctatttgcgaaatcgctccagtgtcctggcagattttccttcgttccggtacttagctgctctttgccctctttcagtttttatctgcttcgccctctcttcgtgttggggctgcatgaactgacactcaatcagcgaggggtgccgactgccagccatggacgagttccatgcgttggccggctgagatgagacccttagaacctgatccggctcgtaccggcggagggactgctgctcttcttgttgttgacggtgcctatgtcttcgtgtctgctgcctgcctgcgaacaccaccagaaacctccgggtaagcccagcagttattgtattgcgcggaggagattcttgtcaaaaaactaatgaagtcgcgcactagatctccaatagatccgtcaagatgcttgcaagtggagtcacctacggcgtgatggcagccacgctcattgcggtggcagcctacgccatcattgtcagtcgccgcatggaagtcaactcggtcaagaacttcgtgaggtgagcgcttccagtcttcagtttggctgcagcagtgggaagcagtacgcttacattttgtgcggcaatatttcaacagcgccaagaactcgacgacgacgctgcgtctggcgtggtgcttcttctcggctggaattggcgctggaacgctgttttcgtacccggagattggtgtgagtgctggatcgtggggtgtcattggctacgcgctctcgggcgtcgttggcatgatcgtgctggcgcttgttggaccgtacacgcgctcggcgctgggtgagaacgtcaccatgacggacgtggtctcgcaccgcttcggctacatcatgcaggtctacgtcgggttcatctccatgttctaccagttcatctgcctcgcgtccgagtacacgtgcatcgcgcagctcacgaccatgatgtcgccgaacgcgcacccgatcgtgacgatcctcatcgtggccttcctcacgaacctctaccttgtcatcggtgggctgcgagccagtctcgctacggacgtgtggcagggtatcggtgtggttttcctggtcgcagttgtgtgcgttgccatgttcttccacgtatccatccccgagggcgcgtggtcgtcgaccaatgtggctgcgttcacgactgcgggttttgagacgcttgtgacgctcgtgattgccgtgacggcttccaacctcttcttcaccggcttctggcagcgcgtgtacgccgcctacgacgacaacacgcttcgcaaggctgcgctcatcgccagtgccatcatcgcgctgttcacggttgcgcttgcgatggctggcatggtctcgtaccttgcgtacccggacggatctctcttcttcgccgtcctgatcgacatggggcgtggctggcaggtgctgatcgttgtcgtcatcgctatgctgtcgagcggagtgtccgactccatccagatgggtctcgctgctgagcttacgacgtgcttccccaagctttcgctcatgcattcgcgtgtcatttgcggtgagtacttgcacttcctcctcctcgcagcttctactgtagtgctaatccccgtcttgttgtttcttgtcagtgcttctcaacgcgccggcgatcgcgatcggataccagcagtacgacatcctgactctctacttgatcgccgacctgctgtgcacggctgctgttggccccatgctcctcggcacctggaagcgcgcgactcgcaccggtgcgctcgccggcagcgccgctggtttactcacgatcttcgtatgcggcgtgattgctcagggcaaattcgtgggcggcttcaactggttcatcctgcccgagggtctctactcgcagaacagcatgatcaccttcatcgtgacgctaattgtgccgccagtcgtgaccgttgctgtgtcgctcatgacgacgcctaaggctagcgaagtggccaaggacgacagctacctgctcgagcactcgcccgtccaggaggccaccaagctctaggagcttgcacggattcaaagtcaaccactgctagggcacatacaaccgttaaccagtgagtcaaaagcgctgcgtcctaaattgcacttgcactgttgcttcgtcagtttgactgagtcagctagaagtcctcgtcccagcacgattccgtcctttgcgtcagaccatgagataccaacagcgaattcctggatcgacgtcaaacgacggttgccaaagggaccgagtttgcttgtcaaatgtaagatttctcgtccgactcattcttgcgttacccggccgctgggcagttggcagccgagacgatggagatatccaggttgctgtgttccagcccggagagccaatgtgaagacacgccatctgaaccagcagcaccagaccaaacgcaagtgctgaaagtgttgccggacaaccaacgcaaacggccgtatcgaatgagcgctgcgcagcggaaacggcggcacgagcacgaggtgtatgagtctcgtgtgtgcaacctcacgttggacatcaacgagcttcggcaacagattcagcagttgatggagcttcgagacgtgcatcacagtcgtctgctgctgaacgaccagcgcttcgaaggtgacgtgctcaagttggtgtggaatctgctcgatggcttgcgtggcggcgccttcgggttgtccccgagtgcgcgaagcagtttttgctcccgtactcacgtgagccagcaggaccccgccgcaagtggagaagtccaccagtacgtgatgcagcgaggccgccctacctttggcaatccaaccttcactgtcaagtccattcgagtgctgaaagtggtcgatgaggaagtgcgaggcaacactggaggctgtgtcgtagaggttctcgcgagtctcaccggaagaatcacacgggggacggttgttgctttgctaccgcagattttgagcgacgaaacacttgtatgtcggatcataggacagagcctcacattttcgtcgcggttgctgctctatttcaacaggcagcgaagactggtgcaacaagtggctcaggctgacattgtggcggcgctcagggctcaccatcttgacgacggaagcgattttgcagcttttcgacccagaagtcatgaatgaatgcggaggttttactaccgcgttagagcttaagtcatgaactcgagctaaagcatttgtcttgaatagcaatggctggcccctgactcaaattgcattcgagctggcataaccgatcatctccaaacgtatcgtcccgtcaactgcaactaactgatccacattccggccggaatgaaagtctcgttgaagtatttctcctttgctatcaatgctgtatctcgttcactcacttcggaatttgcctcctccagcatgcagcgcgtcaccaagccccttcctcttcgcactatgtgccattcaacaccgacctccgccgccgctggcagcaccgtgcaatttagcaccgccacgaccagccaacaactgactgaagcaatccgccgggctcgtacggttcgagcttcgagtcctggtggatgtcgcggcgtatcccgccgacacccgctcacggatgcgcgaactcaaccacaagtccgccatcacgggcggggtgactggcgtccgcatcagccatggactggagacggtgttctccgcttcaaggccgcgagagctatgcagaactccgagcaaccgatttcacaagagggggccaaaaagcaagcagagggcgtcacgcacggacgattcggccgcttttcgagccaccggccgcccacggcggatgagcagatgagggctttcgctgctgtccgtggagagggtcatctcggaatggaacaaggctctccatttgctgacattgatccagcttgcaagagggagtggatgcaacagcgcaaggcccgccgtgatgctcctcgaaccgtgtactcagcgccaccgtccggagagcagcagcctctccaagagcatgctgaagccactccactcctccgtggccgtgagtggtttgcacactcgggccgccacggcggtcatcatggcagtcgtcacggcaacggcggtcgctaccgctacgtgtgatgctacaatgcattccggagcctacagagtagggcagtcttacgtagtatacggtagcccccgagttgacaatctgtaaagcaacgaaggaatgatcctgcttcattcattcactcactccgtgccttatctttcatactgtggactattgttccagacgacggcaacgacgccggcgacgacactgcgctgcagccgatgcaggcagcttgaccgacacagcaacggacctgatcgcgcttacgttgcttactgcgtgtgtgccgcatcaacagcgacaagcgccattcgtttggtgctgcggggctggagtgtgttgccatacagggcacgctttccttgcagagcaggcagaagtagtagtagaggaccgataaacggcttgcttaaatgaatgaaatgaactcgcttcgcaatccgcgcaaacgcagcaacacgccgatctcgaggcaagttgaagccgcaggtaccatcattccgtctgataaatttatgtggcacacattgattacatcagattactccccggcgccattaccgaagtacgtcggcgtttccgccggtcaatcacttcctcattgccctcctgcgttacccgtcgcgtctaagccatgttccgcctcgccaagtccgtctctacgcgcctcaccgtcacccgcctgccactcaccggccgttgcgtcgccttcttcaacacagaggcgccgcagatgggcacgcggctgacgcccgagcagatcgccgagcgccgcgccaagcgcgcggagaggaaggcggcgacggaggaggagaagagcgaagcgctgttcatcgagggctcggcgcggtcgtaccagcgacactatgtgatcgtggagccgcagaacacggaccccaacgcgtggcccgccaagctagagcgctcgcccgagcacattctgagctcgtacatgggcgcgctggcgaaagtctacggctgggacgtcatgaaggtcaagaagagcccgctgatggtgacagcggccattccgtacacgggcgtgtgcagcggtgggatgaaggaggttgaggagtcgacagaagacgcggaggaaggcgcccacgacgttctggtgttcccggacggtgttcgcgtgcacaacgtcgttccgtcgaagagtaagtgtgggtcgactgtgtgatgaaggagacgacttgtctaatgagtatcttggtttggttcgtgcagtctcgaccctggtgagcaactcgttgaagaaggacctggacatgccgaagctgctcgaacaggagtacgttgagtggattgaaagtgctatctgtgttgggttgagaataatagtgctaaccgttggccttgtctccatgcaggaacctgcagtacactcggatcgaagaaggctatcacatgatggtgtgcggccacgctgcaaggtatggctgcgttctgacgtcggcttgtgaatttgcagttttctaatatcgaatgtgaaaacttatcgtttgaaccacagagacgagcgttgtggctgcaagggtccggaactgctggagtggctgaagagctccgcatctgaggcgaacaagccgttgaacttgtggacgtcaagccactacggcggccaccgctatgccgctgcatgcatagtgtatcctagcggcgactggttcggcctcctgaacgaaaaagacaaggcgaagggcatgatcgacgctatgaacgacgaggatccgttgcggctgttcgagctctggcgcggccgcatggggctcacggagctggagatgcaccaggccgtcaaggaaagggtagagtcttccgaagacgtcgccgagaacgcgtagacagcggcggtagtgcgtttttgccaccttattgtgttccacttcaaacgaatagtacatcgagaccatcatagacaacttgcgcctgtgttgtgtaagagtgaaaagaaaacttgatttccaccaagagtcagctaaatctagctccacctagtgatacgcaagagcagacatgaccacgtaagacgctgtttcaaacttccttgttcgtgtggtctggagttcataactggcggcactggcaattccaaactattcgcctatccgcacactgggcttcgttccagatgactactgccgatgccaagacggcgttggaaccggccattgtgttcgctactgttgtggtcctgacgagaaccttgacagcgccagcagcggacggatcccgagctcagattgcgagctgacgctgcaccagccagccggccagttgagcacagcctgcctgctggctcaccacgagcgagtcaagcgtggcgcgatccagcgagagacagctgacagcagtcacctgcttcggctgcttgttgccgttggctctaaagtccaaagtggcggcggcagcagggtgcgcggcttgaagagggcaagtgggcaagtttcgggccgagcaagtgcttgctggttgaagtgaacgttcgctgcatttttttgtgcgttagtcgccgcgccgagaagatgcacgggggactcgcagcccaggagcgctctcgctgagttttacagcggcgcagtgcgggaccaggacgcgggggcatcgataaggtgatctcgtcacgggttgccagccctcgtggcagcaggagctgacgacgctcggcggcggcccagccggtccacggcattgtccggtaattttcgctgaacatgtcgaagacttggaatttgtatcgcattatccggcacccgctctgatttgctacgctcttgttcgaatatcgctcccctctaccattgctggttgcagtgcaacgccttgcccggctccgctcgcggcgcgacgcagcggcatgtccaaagagtgtcgacgacgagcgtttcaatggcggggaagaaccgcatcgaaaagcgcagcgcagggcgtttccccgccgtgtacaggcagcgctgaacagcgaagcacgcacggcgccgtcaatggccagcgtcaattgcggaggcctcacccatcagcccagcgtgttgaaaccgtccgccgcctcttttcctacgtggcccgcagcgcggcagcattggatcgtgcggcgagcaccgcgccgccagcgagcagaggcgccgacagcagaggcgccgacagctgggcgcgctgcagtccgagcccgggagccccgcgttggctgcccgcaagcagcaggccgcgaggcagctcgtgagctcgcccgagaccaagcagtgccacttttcaacatgtcgccgctgttgaaaattcgcagcggagacttggtggtacagaaaatacgtgaagaacagagcgtgttgtggcacatgtggttactcaagtaatttaacttgtagagttcggatgcgagtcaaaacgcgaatccaacggtactaagttgtagaggaaagtgaatcttcgcgacgaggccgctccgtacattttcgcatacaaatccccacagtggaagaggcagagcccggctgtgttacgacactcgaggacggaaatccgaggggaaggtaagcgcctcacttgcccccagtatgcctcttccgcccacacaacgccacacaaacgggcccctggcgtcttcagccaagtcatttgcggatttcgctcgagccagccagcgaccatcactccgggccacctcagctccgcaaggttcattcgcgcacttccccgccgaccgcgcaggggggagtattacctcgagccctcagcttctcagcaccatggcgtccacgttcgtgccgaccccgagcctctcggcgggcgagcccagccccagcagcagcaacggcggcggagaggcgcgcgccgcgccgctctcctcggcctcgcgcttcgcgcagcgccgcctgcgtgtcgtcacggagcccaaacacagcaacaagatgcaccgcacgcgcacgctgtcggagctgatcctgctgtcgccgcgcagcagcccgcgcatcacgcctcgccacaagcgcttcgacatggacatagaggtgtccagctttttcgcggagggcgagggtctcgtggacctcatgggcagcagccgcaacggcctgcgaagactcagcgagcggcactcgacgggcttctcggccatcaacgagaacgtcgcgaccaacggcaacagcagcagcagaaacagatttttcccgaataacgacgaggacgaggcagcagacaaccagcacgaggagatggacgtggacgaggagcagcccgagccggaggccgaggctgagcccgatgctgagccgcaggagacacagcgcagtgtgggtgaagtcgttgacatgctctttgagatccactcggcgttgaaaagccgacacctgggacagagaaccgcagcctcggcgcttgctgcgagtaacctggtcagcacgcaggcgtaccctgcgcctgagccgatccccagagacgagcagctggaggcgctggagaacacgcgcaagatgctcgagtgcgccatctgccaggaggtttttaccaatgcaacggaagccacgtgctgtggacaaattttctgcaaggagtgcattgagcggtgggtgagcgagcgtggatcctgccccatgtgcagagaggcgattggcttctcgctgcttgcggcgtcgcgtcacgcgcagcgcatggctaacgagatgaaggtcaactgcccgtactgctccgagacaatgaagaaggcgggcctagcagaccacgtcagcgcatgtgaccaggcaccggttgagccgcctccaccggcggatgtcgcgctgcgtcagctgctgattcgcactgcacgaatgaacagcaccttccttgctcgcttcctgaccgcaccgtccccgcctcaggcgctgatgatgcagtgctacatccgcactcgcggtggaggcaactacgagttgtacacacaggacacggacacgcttctgtgcacggctgttcgccgtcgccagtacgacatgtcggtgagcttcatcatctcgctcgcgacgaacctggacgcctccaaccaagcggacgaggatggagccattccgattaacacccctgtgccggttgcacgactagacaagaactacatgggatcgcagtacacgatgtacgacacgaccggcgaggtgcccaccgagctgggtgcggtgcagtatgctgccacgttcggaaaatccccgcggcaaatgcgtgttgcgcttcctctcgttgcgcctgtgcctgatgtcgacagtgccgttgacggtgctccgtcgtggcaggtgcagccatggagaccagagaccaaggaggacacgattctgtcacaagtggagaacccggacactgctcgcgcgttgcacctcatcaacaagccgcctgtgtggatcgagtcgctggaggcttactgcctggacttcggtggccgtgtcgccgcagcatccgtgaagaacttcctgctctctcaccctgacgacatggacaagactcttatgctgttcggccgcactcaggaccgccaggtttactcgatggactacgcccacccgttcacaccggtgcaggccttcgcgattgctctgagcagcatggactctcaccttgtgacctttgattagacgggagttggttgcggtatcggtgcgcgcaggcatgcggcgaggcgaagcgtgtattaagtctcctgcgtgaaaaatttagcgatcgactgctgttctcgcgcgtcaccgacttgctggattggaccattcgacccaagcatctctgtaactagccccaccctgtagatccacacaacgccaacagttatcgtagcaagttccattttggcttttcgatgtaaaataatagcaaacgtgctgcatttttactttactccacagaaccacttggtgtccatcatcttcttatcgcggtgcagtcgtgtgctcgttgtgacttgtcatccactcagcgcctattgcttcatcagctgggaaagtttgcgtggtgcctgagatcacgacgacggtaacgagttgcgaggcgcaacatcccagcaaagcttcctcttcgcggcttccaatagattctcgacacaactgtccctggcggtgccgcaccgcattcagccgaagcaagagcaacaagagttcaccgttctacagagcatcgaccaccgaagctttgccaacttgtgtaacgttgccctgtaaatgcgtggtgctgatgttgcagcctgcaacttgcaggccgcaatgcagacgggcaattccttccccgagatgacgcgagttttcgtgccgatggtccatccttccaccaccgccgccttcaagacaaaccgtcactcctcaaagaacctccttcaagcgcaatggtgaccacgtctctcctcgcagtctcggcctcaatcccacggaatctggcgaaacttcctcgcgttgtgcggctcgtcaacgacttcttgcagcccaggaacctcgacgccgctgtgtactacgacctgcatcgcgtagttcaagtacacagaagctctcgtccctgcactagtcaagcgctggactttgcggctgcccacggtcaactcggactgctccagatttctccaagatatccctctgctgctttggccagggcagcggctaacgaacacctggacgtggtcaagtggctagttatgaagctgcgtggagtcaagagccagatttgtaccttgacgaagctctgaaagctgctgcaatcaatgaacgggcaagtcgaagttgtccacttcctccggaagcgatgcgaccaatctaccatcgccttcgctttcaagatggcagcaagatccaaccatgtctccgtcttgaaattgctggtcccgtggatgctagcgccacaatatacccctctgtctgcgcaatgccgcaagacccccaagacgacggagactgcgtggccaagtcgaacggagtggggcaaagagctaccagactacgtccctctccgcgaggtatccccgctggaagctgctttgaacgctgcagcagcgaatggccacgtcgagactgttgaattcttgttgaacgtggagagcagccatcggtgtaaaccacgggtagtgcggtggaggatgcagcgagcaatggccactttgccgtggttcggctgctggtgaagtgcagcaacccgtgctgcacgacttttgcgttgctgagagctgcttccagcggagatgtcgaagccgtcaaggtgctgatcagcggatgcaacccggctgctgtaggcagggtagcgtgctcagccatacggaagaaccacgatgaagtggtgacgttgctgttgcgaactggacatctaggacctgaaatcaggcgactgcaacgattttcttctataaccctccgcgaggcctggcgccaagcgacaagcggtggccacatcgctatggtcgagcatttgctcgcagagtctcctgcacaggatgtatcgctcctccttcgcgcggccattggtgctgggaacgttgatttagttcgtttgctgacctcaagcggcaacccatacagtcgcggcatgctgtgcgcggccgcatttcggggccatatcgacattgtgaggctgctactccccaaaagcgactcggatagtatcaatgatgcggtgggaggggcgtcactttatggacatgtaagactcctcggcaaggcaagccccgacacgcttgggcccgcgttgcacagggcggcctcggctggtcaagtggagacgctgaaacttttactcgatgtgtgggaagatcgccccaagaaggaccccctaaaggtgcgctacattacgtctgcgatgaagaacgccatactgaacgacgaggttgaggtggcgacgctcttggctgcgcgaggcggatactacgtggtttgtccggcgttgcgattggcagtgattcataacaatgcgctgatggtcaaggagctggccaagagaagcacgcccagtgctgtcatttgtgccgcggctgagtcttcaacgcgcggtcaggcgataatggtgaagctgctgctgaaatattgcgacgcgcttactctcgagctggcgatggaagatgctgtggtgaacggcaacattaaaacggcgaagaacttgttgacggcgtgcgatgcacagatgattgagcgcattttggtgaaggcgacagcacgcggtagcatcaagctggcgagtagaaaacgacgagaacaaagctggacactgaaagcgcggcagctcgagccaacttcacacacgcgtgcctcccgatttttccaaccgagattctcgataccaaccaacaccagaacaccaggatttgtaactctgtgagctcacaatgctagcaatgtcgaagacggtgcgcctccccccgaatgcagcgactccaagatggcgcgtcaccaagctgatacgtccatctctccagccattgaacgggatgcttacgcggttcgaggtggtagcattcctcacatcattttcaagtttaccacgtgaagcaccaagcacaccgcccgaatggagataacacctctgctgactgtctcgttggcgctcccgcccccgaggcaccctccacgttctgcaatgcatcacggactatatacttcccgagacaatcgaccgcgctgttgcccacgaccttcagcacatgattcggaactacggagcttctcgcgcttggacggctgacgccatggacggcgctgcggcaaacggtcgactcgatatcgtgcagatgctgcatgccgagaggagtgaaggatgcacagtcaaggcgatcgtcggagcagcatcgaatggacacctcgaagtggtcaagtggctgtgcgccaactacaccacgatctgcacgaagcgttggtgccagcagcgacaaatagacacgtccaagtctacaagttcctgcggtcccgtcgggtccagcttgaagcaggatcgccgtttttccctttcacactccaccagaccttgtacccggcgacggtaaacggccatgtcgctatggttgagcatttgctcacggaatgctcttcctatgacgtatctcccgcattgacaggagctattgctgcaggcaacgttgatgttgttcgcctgctgctcgcaagcggaaaccagtacgaccaccacgcgacactgatcagtgcagctgcaacgggtcgaaccgatatcgtggagctgctgttgcccacgagcgacttggacagcatcacggacgccattggttccgcgtcattccacggtcacacgcgcccagcaacgtcctcgccgtcttgagattcttgttcagcacgatatcttccaggacctgttcgatcgtgagcgcgtcgcagtgtttcagtagcagctccaccatctgcgcccgtccccgcgccgcagcttcagtcgccgcgtggatgatcgcgctcggacatgtcgacttggtgatgctgcttatcgtcagggcggactccgataggcttggccgcgcgttggagtcgccaccacgtttgccttccctcacccgccgcgatgtcttttaccaagctgcaggaaatggccaacttgatttggttgagcattttctcacggagtctccgacacaggatgtatcgcacctccttcacgaggccataaccgctggtgacgtagcgttggctcgagtgctgatctcaagtggcaacccgcatggtcgcaacgtgctgcgcccagcggcagcatcgggtcatatcgagatcgtggagctgctactacccacaagcgacttggacagtgtcaacgaggcgattagttgggcgtcactgtatgagcacgtggtcgttgtgaggctcctcgacagagccgactccaatagccttgggcctgcgttggataatgcagcgtcggctggccaagtgggagtgatgagtcttctgggaataccgaccggagcaggaccggctgaaattgaactacatcgtaagcgcgatgaagaatgcggtgacacccggcgtcgaggttggcgatgggcaggggtaataaggtgttagtgagggagctggccaagtagtgcaaactgacggtagtcgtcaatgcggcagctagtgctgccaagcatggaaaggcaaagatggcaaagctgctgctgaaacattgtaatgcactcgtcgtcgagctcgccttggaggtcatcgtggcccagcacaagatcccgatggcgaaggtcctgctggaagcgtgcaatgcgcaaaaggttgcgcgcatattggtgatagcgacgacacgtgggcgagccaaggtcgtggaattaattcaggcaggacgcaattaaacagcactcaacaccggaggcgcagagctaacgtacgtcatacagggtgcgattccatcggctgtgccaccggaaaatcaggagcttagagtatgatactggcattacattcgcaagtggtaaactgacccaatcttcacacaaagttcctcgtacttggcgaccacctccccggctactttatgtattgccctgcttgacttgcaacactcgagttcaggagtccttgtagaaatatgaccagactggcgcagtcgcgttcaaccgcgatcgctaagaccgcatcgatcgcttcatcacagctttcttccaccacaaccttcgccgtgtcgaggttatcgcatgccaccatgtcctccaagatagcctccaatacctccgggtcgcagcgtcttagcagcattcccgtcattctaggcaacgacgtgatgctgcggtggctgcttgatgagcgatagcatgttgcgtgctcacattcgccagcactttggcaatctcgacgttgttcttcaccactgcaagccttaacgcagggtcaatcagcttggggtcgcacctatcagccagcagttttaccacctcgaggtggcctagcaacaccgcctccttcacagcagcggggatcgctctcagtttggcttcggccttggacgaccttgtctcccaggcgtcgagaagcagctccatcgtctccacctggttcatggaggctgcctggacgaatgctgatccaatacgctccacgtctccgcgctcgagcaggaacttcaccatgtcaacgtgaccgtgcttcgcagcggggccaactgccgcgctgatactttccacgtcgcacatgggcagcagatactccaccatctcaaacgagcccgttcctgctgcagtaggcaacaatggatgaaactcggtccgtccgctctgaaccagcaagtcaacgacgttgaggtggccttgcttgatcacccgttgcgtcaacccggtcaagtctcccaacaaaaagctcattggcagcaggaagtcggtcgcttcagcgtggccattgagcgctgcagcgagcagaacatccctgatgttaaaccaccggccgactcgaggtggcaggtacttgatcacatccatgtggcccttagctgctgctgcttcgagggccttaacgggggacgttttctctttgttcttgtgctgctcgccgagatattccaacacgttaagatggttttcggtcgtggcatcggcatagaataggattagcgtgctgcatgatgtggggatcaaagtaagacttgacattaagagattacgaagcagccgcgcgttggcacgccttaggcgtgaaccccattgcgacgagtggtgctcgtatcgcgaaaaatgccaagtcgccgttgcctgccatcatcgctgcgagtggtgctcccagttcttgcgtgtagtgtgtgtaactctgaaatacgcttgacttccacctgccgtgaagtttaattgttgttgaatctgctccaccggctattagcgcagaggccccgccgctgcgtagcgagtgacaggatatcgctgcgggtcgattccggtgccgattgcagccgctttcagggctttggacatttcttctgccttgagcattcgggacttgctgaacgaacatatcgggtcggtcggccttagatggtgtcgacgggctagttccagcagcagtgaggctccgattaccggacagaccctgccatgtccggatcgtgataagtaacgtgccgatccttcgcctcgctgatcggtcttgcttccgcggagtgttattatcgcatgaaccgcgtcatcgaagttgaccgcaggattgcctgtgatgtcaagtacttcgacgtcgcggacctctaacgccttccccctttgatcgccagatattcggaacttcttaggagatagaagaaacccagcagcgcagccccaagaaataggcgttgcttgggtttcgtgtagtcgatttgggcggacatccactcgagcattgtacgagtgacgggagatcggggtcgaggaggaggactattcctgcgaacgctgtggcgtggctggggctgatgacgggttcgaacccggcatagactttatgatgccatttgacatggctaacttgggcgtgcacggaggaggtagatccgactcgtccgtctaagcatgtagccgaccatcgatcgatggcaaaaaacaccagttggagaggagagactgcgcgacttgatcgtgctctggtagccagggagatcgtccgatgcgccgactgaaggagacccattgcttccatgtcgagtcgtattgtcgtcgggacgtatcggcaagggagcgttgttgaagagcgaccagctgccgtcgtaagccttcctcatgctgtcgggcactttgacctacatccaatcattggttagtttgttccagagtgtaagttgcgggtcggaccatgcgcgggaccccaggtcggctaggacattggatgatccggcaagatgtttggctgatacccgtatgctccattcggcttcgactgctccaaaaattcggttcatctcttgtgataacggattcgtgctggttagcttgttgtaccacgtcactgcggcggcgttgtctatccagaatcgtacgtgtgtcaatgtggtgcggctcgaggatcgccagtgcttgccccagcacagtactgctactagtgcgctgaattgttcacgtacgtttatactcagccgacgttgcttgatgagggcttgctcgacggtgtcaaattgtaggcggatgaattcgtgtcgtacgggattcagaacgcacagtccgctatcgctagcatccatgtacaagtgtaccgccggagcaggtaatccacaaaaatactcgagaggtaccccgcgtagacgtccaaatcgaagaatatgggcgaaccaggcgagaacgagacgtgcttctagagtgaggctaatcggtcgtacccttggtgagcgtttccatagtgccactaactgttggaagaacggtttagccgggcggatgcaggagcagacatgccgtagacttcccagtagcttcgctagcgcagtccgcgtcgtctgagatgagactagaacagcttcgactctccccagagctttttgaagtttggatacgggcattgataccgtcatagcgacggagtcccattccggacctagggtcactacgttcgtcgaccactcggtgaacttcttgttgttgatagctcttgggcctagcaccgccgtcatggctagccgaagcgcgctgtcacaggcttggaggcgatcatgggtctcgtactccaccaacacgtgatcgtctacccagtcgaaacaaaagaacggggtagtgtcaggattggtcggatcgagtgtgttcgggctctcgcgacgcacaatgtgagatatggctgttccaaacacaccatagtgggctgcggagcctgtccagccgaaaggtagtgcgagatcgatgatcgtgacatcttcgtcaggtaacgagccggcgaagaaggcgctgacatcttcgtgaacgtgtaggtttttatacgcagatttcacatcgcctttcataatcttgattatcagcgttgggttggctttccgtagtgcgatgattctgtgcgcgatgatgtcgacaagttcgtacacgagcgtgggtatgctgtgttggtcggaccaagcatttgtcgagtggcccagcggaaacgataaatcgtgaattactctcgcttcgactgttagatcggcgtcggtcttctcgacacaaccaaatggactgtaatgcaggcgccaccgcgatgccgcgtctcgcgatacaacgaggcacgcaccgcttctctgtccatctcggatgcttctgattagcgcgttgcgcatgactgccgcagacttgtggtttggtacggggcaggtttgttgagtgccatcaacttgaaagacgtgcttcacaccctgtgtggctgtacgtatgagcaggttgacgtgctcgtactcgtgaagtagccacgggaagtgatcgtggaccagcgctttatttggtgtgggcgatgacgcggactggcctcgccagagacgaatcgtttcagcgagggtcatattcgtgcgcgtcacgagaagcgaaatggctcgtaccatgtcgtgatcgagcgagaacgttggtcgtggcccagtgtcattcgccgctggtatgccgtgtggtggttcgacgtctgctgcttcaaaggctgcgaatggcgattgcttgcgcgttttctctgacgcttgtaggcgctgttctaggagctcgattactcttgataccacagaccgcgatcccacccgtgggtgtgcggcaagtgtcgatggcactcgcaggcttcattcctgcttcgcgaaggtccgaacgccgccgtaggtgtcccgtatgtacgccgctacggcttctggtagttcggccggctcaaagtgtgctaaaaagctctgcaggcaccggtccttgctcttggacgaacacccttgtacagaagcataccggaggcagagctggcgtccgtctttctttggaacttgggccgagatttcctgaagtaccttacggtccctacgcttaactccttgccgagccacagcgtcgtttcctcctttgtgaaccgctcgggtgctgtcccgggtaggtgatggaccatttgtcccggacgcttggttcgcgcgtgcacgtgaggccttgaccagtaatccggccagctcggggtcttgcatcgtgaatcggaaacggaccgaatggcgcgtgctagaccccgatcgcatgtcttcaacaaccgcaaggcgatatgctccgatgatgttggagaaccagaacgcgagaatgtggacttcggacgagctccacggggcaaaatcctccagttgttccccgaaatcttcagcggccgcgaagacgtctcttgtctcctcgttgaaaaactcttttgcaaacgtgtaaagcacggatagagcttcggtgaggtggtttatcaggtaattcgggcaacgccactttgctggagaaattgcgcatgttgaccgccttcgcctttgatcggttgagttggctgtcgagggcaaaccgtgggaaatgcaggatggataagtcgcacgcgctgaactcgatgtcgaacagtcgggaagcgatagccggatgagccagaaacttggttgccgttgaggtccgtacatggtccatgtaaacgtctccgtccttacctatatatgctggtgctgagatggtgtcgtgtacttcttgttgggcacgagatgggcgaaaattctgctgtcgtcgatcacttggttcgttcactgggatcaggtctgacgggttcattcctgtcacttgacttggagatgtcgctgttgccgctatcgttgcagctgttgggcgtaatctgccagtaccgacgggtacggagcggagctaacgcgtgcaatatcgcttgcaccgggtcggcggtagcgggttcagcgcgcgaatcaccttgggctgtggttacgtgtcggcggcgcctgctcagtgcgcactgtgcgtcggcgttttggcgcgggatgatcgctactaagcgcgtccagtagatctgcaaatcgcgttgccgcagcgccttcgcgagggcgggtggcagggccgtcgaggaacgttgctccgacgcggacgttagcgggtatggcccgcccgccgtctacgtagaaggcgaagttgaggacgtcgacgacgctgactagaagctcgtgacccgttctgggacatacccacggcaccatggccgatggtctgggcttggattggcgagtggcgattcctgctaacagtctggaaatggctttggtggcccgttggccgttctgtccgagtaggcggtccagaatcagcgcgtgggccgcttcgagatcggacatcgaagcaacgtcctcaagcaagaccgcattccacagtagtacggccacagctggagcaatctcggtgggagcgctgaacgggacttcatgggtttctccctccgtgcttacaacgtacacggtgctgttgtaggccgtaatttgaccgtgcctgaacacgtcgccaacgcggtagcagactgggaggaaaagtttcactccgggttggcctgtgctgagctccgaccttggaactgatctcgccgcggccacggcacgcgtgattgtggccgaggtgctctcctcatcgtccgagcggggtagaatggtcacttggactgtacccccacgtcttgccgttacttctggggccatccagctgtgcgcttggtacatccgcggggaagagtagcactgaggttcgagacatgattcgccggcgataaggacttggagccggctggttgggcgaagggagaattgagagcgacttcgactagttgctgggtcgtctcaggtgtactttaagcgctgccagagcacaagagttgaagacgaccttgaacccgattggtgcatcagaagatcggccgctttaagctggtgagttgattcaagctggagcggcacttgaacactaaaggcgtagcgactagtgctccgacgacagcgacatggacgaggatcaccaactcctccgccttcgccactttattctcaaccactgccagtcccaacgcgggaagaatgccataggatccgctttgggcagccaccagcttcgcttcttctagcattcttcatcgcgcaagtaatgcagtgcatcttcacttcgtcctcctcgagttgatcttccaacgcgtcaagtaggagccttataacttcgacgtggccagccatatccagcgcagatccaagatcgttggggtctgccttgtggaggagctgcctcgctaggtcgacatatccgtggtgtagtgcaaaagaaatcgcctcagtaagtcagtgatcctgtctcagcccaacgtaattcagtttaaaaaccgcaggttctgacggtagcgccccccgcaagtacatgtactcgtagtgacagcaacgaatccatccttgcatgagagcggggcgaactctcagagcaattgtatactgcatagtaaggaggcatatagcaaagagaaactaacagaaaccactgcggcttgcgccgcagcggctgcattaataccagaattcatttcacctccaagcaaggattctcaagcaagcaaagggtcgaaagacactacatctttatactttcaggcaacctcgtgtacttatcgaaaggggcgaagaacactgcacccactgtgaagccccgactcgtcctgtgctgatcaagctgccacctgtatttactccttcttgtcgcctcccaggtgcttgaagtcgaacgactcgtgaaaagcgcctagcgccggctggatgcgcgccgcccaggcctgcgactggtctcccacagcctccaggatctctcggagattcagcccccacgcctcctgtggccgcttcgggtcctccggcaccacgaaggtggcagacacgtggtagtggccgaacgagttgtggcgcaacgccggtagagcggatcttcagtcaaaagggggggggggggggggcgcgatttcgacccgattttgccgatttcagccctgcccccctatgttttttttcctgccaccccatttttcaaggccaacatccgccagtgggcagggcggcgcggacggcagtagccggcagcattggcgcttgtgcttgagggagacgatagcgaaagtgaagtgggtacaataaaatcagtgttctctggattttatccagagttgttagggcgatacgactacaggtgcaaatcactataaaaatgcatgctccgctatcggttataaacgaacgaatcatatacgtatcggaacgtacccgttaactttaataaacgcttggattataaattatccagcggcgtgttgctagagtcttttagggtcgacattcacgtgacacgatcgatcggatgtcgctccaccatgactcctaacataactacagttgtatttgcagtacatgtatgttcaacgatgttacatcggtgtcgccacgttcaagtcatgaaacgacacccacgaacacccaccacttcaatttaaagccgtgggtgtcgttgaagtcttcaaacgatgctggtttcgtttcaaccattctgcacgtcgttaccgccgcattcaagccttgacgttgactgcatattattgcaagatagttaagccatagcgagtgaccagtacatgctcgcgtaagggcttgatatagttggcagtgcacgctttcatggttttagaacttggtagcaaacccgaataaagacaaaagcaccaactgctaaaaaataaggatacttcactctaaccaaagaacctcgggtagaactgctaggcatatttaagataaattaccttagaatcaaacctagaatcaaaattacatgataaaatccagagcttctccgtgctttagcacggcttagttgaacatacgggattaaacatacgctaaaacccgtatgagaatagaaaaacatcatacggatttttgtacggcttctcgttgaagacacagattttgacaatcatactgacgccaagatgccgacgttcctgctgcccgtgacgcgccgctcgctgccgttcgcgacgtccctgctgcacttctcctcgcgcttctcgtctcctcttgcccctcccgtccaattcctcatctcgtccacgtcgcgcgacctggcccactctcttcgttcccagctcccgtccctcctcttctcctcccacgaacacgaatccatcccggactattccgacccaaaggacctcaaagaggccttggggggctgtgacgcggtcgttctagccgccagcgggtgcggggacgacgtcgtcaacctgccgagcaacccagcggacgagtggcttcagtgcgagcagaacgtggcgagtctcgtgtccagagaccacttggtcgccaagttatcgtggaccgaagggtttgtgggggaacgttctccttctgccattgggagggcgacctggcaggtagaacgagagttgaagctcagacttgggggtggggagggcgatggcgacgggtgggctcgtaacctgctcgttctacggacccccacggggatggacgccttcctgcgaggtcggctgttcgacttggtctgtgggaggacgctctccacgagcgtcaagagggggcgcgtcgccttcgtgcatccgttggacgtcgcggagacgctgagtgcgttgttgctgcagaaggagaaggttgagggtggggggattggagagcgaggggtggtcacgttgacggggcccgaggcgttgacgttccaggacgttgccaagctgttgagtgagggcattggagacaaggtgaactactcgcacttccccctatgggccgtccagccggcgagatgggtgcgtggggtccctggagacgccatcgaggaggaactcgcggtggttcgagcgctggagtctggagctcaggaaaaagtggacacgcaggtactggagaaggtgctgggacgcaagccgcgctcgttccgtgagtttgtcgctgagaatgcggacgcgtggccacgtgctgacccactttagttgggttcggagtggattgcgaacgaaacgcgcgattctgaggtgacgaaaaaagagttcgagactgagatgagatgaacaggggatgaaaatacatcgttgcaggatgtcacacgtccgccgatgatagctatagccgagaacgaccaggtcaacttatagccgctatgcacagctcagatcagttttgcttgtgtttctgctgagaagttagttcctatttttcaagactgggcatacgttgcaaggtctcttttggttggacatggggattcaatggtcgctgctggaagcctcgaggagaggggtggtcgtagatgtgaagcttgctctagaacgtggggagcttgtggataccaaggacgggaatggctagactcctctgttgcttgcatctcgcgaaggccacgctggggtggtgagtctgcttctctactacgatgccaatgctgacttgagtggcaagacagggtggactccgttgatgtgggctgctgatggcggccatcaggacgtgtgcagcttttacttgacggcagaacaaacgtcaatctgcaaaatgcagtggggcaaacagcgttgacgattgcagtcttgaaaggccgactagagatcgctcgcttgctgctgagccatagcggacatggatgggtggactccgctgatgaatgctgtccgaagtggccacgtcgatttgatccgccttctccttgaaaaccaggcagacctcgaagctaaaaccaagcaagggaaaacagtgctgaagttggtagagggaatgggaaatgcggacgtcgccaaggtttttgaagagttgaagaaccaacggaagatgcgggctgacgcatgggaggccacaacatcccagcgaaatgtggaattggtcgaggatcataggacgttgttttagaaggcgatgtaccaggcgtcagggctgctcttggccggggagagagccccaataccagagattccgacaaacgaacggctctcttggtagctgtggaaaatggccacgaagaagtggtccgacgtttggtagagcaaggcacagactgcaatgcgggggctaaaacaggcaagaccccgctgtgtgttgccgcggaacaaggcaaaacaaatatccttcgtatcttgctcgatcataatgctgtggtcgacctctctgacgcggtgctgtggaccccgctaatacacgctgctgccggttggcacctggacgctgagcagctattgatcgagcggaaggcgaatgtcaacgcattgtccaggtacgatcggacagctttgcaccatactgcgagtacggggcaactccatacggctcaagtccttctcgatagcggagctgagatcgatttagcggacgtgaatgggcgaactccgttgtgggtagcctgcgatgctgagaaggaagagctcatttggcttcttggatagggacggaaggtccattttgctgcgctctgtgatgatggctaagctgctacccgctacaattctgctggaaaatggcgcagatattgatctgtcgtgtagacgagggatgacggcactaatggttgcttcgatgaagggcaacacggatacggtgcagctcctgctaaaccacaatccagatgtgaacaagcacaatatttcctggaaaacggcactggattatactgaaagtcacgaagacccgatgatagcaacactgttgtgcggcgccgaacaatccagacagccaacacacaatgtcgcgcttcaaactgacgaagttcagggatccgagatcgcgacgctctttggcgagtatgagtacaagggttcactggtgaaagacgcggggacggaaactgaggaggcagctgaaaagaattattcgattgatgatgtttctagcgtgcaaactcaaagcacggtggtggaagaatatcacagtggaagtgggagtggaagtgatagcgatagagaaagttcatacagcgcaggagaagaaacagtgtccctggaggaagagtcagtggccgatagcgagagtgacggtggtcgtgacgaggagagttcagaatcagaggctgagagcgaatcatcatcttgaggtaactgtgcaaggaggtgtcagtaagaaaatgtgtgaagactttgaaaacaagcatcagacgctggtcgaacatacacagaaagctgcaccagcggtggaaaggcaccgatcgttacttgagtctgttggacaaggcaatatagacggcgttaaggctgctcttgatcgcggagagctccccagtacgatggatgccgacaagtcccctttgctgatcgctgtagaaaatggctatgcagacgtggtccgccttcttgtagagcgcagcgcagactgcaacgcaggaggtgaagcaagcaagactccattgtgcgttgccgtggagaaaggaaaaacgagtatcgtccgtatcttgcttgatcatggagcggcagtcgactgcacagatgctgtccggtggtctccattgattgttgctgtaatttatgggcatttggaggttgcacagcttttgatcgagcggaaggcgaatgtcaacacaaagtgcagggagggtcggacaccattgtgatcgcgggacacatgcatatagttcagtttcttctcgattgcggtgctgagatcgatttagcggatgcggaggggcataccccgttgggtagcctgcgtgacggagaaggaagaactgattcgattttttatgactcgaaggccctatatcaacatcctgggctgcaaaggaagatccattctgctagactgtgccgcggcggggaagctgttaccggccacaattttgctggaaaatggtgcagatatcaatcttgcatgcgacgggatgacgccattaatggttgcagcgatgacaggcaacacgaaaatcgtgcagcttctgctaagccgcaatgcagatgtgaacaagcacactagttctggaaaaacggcgctggatatagctgaatgtggcggatatccgatgatagcaacacttttaagacaacaatgcagcaatgcgcagccggatcagccaacgttcaatatcgctcttccaggagatgaggtccaggagcctgaaatcactaaacattttgacgagtaagaccacatgggtacgattgtcaaagaagagggagcgggaagtgaggcaacagctccgactgtctttccgcttgattctcttggaaatatagagactcgcgatacgaaagagggaccgacgctaatccaatccgtcattcgacaccaacttggagctcttcaactgctcatagagcacggtgctgagatcgatgctcgagatgaagctggaaacactccgctgctgttatccatgtcgctagggtttaacgatttggtggacctgctactaggcaacaatgcaaatgctgacgcgacgaatagcgaaggggctacaccactcatcaatgccgctagacgtggaaacaatgatgttgtgcacaagcttctggacagacaagtgaattctgacgcacaaaacgctacagaacaatcgctgctgtaaacgacacagtatccaacgactgtcgaaatctttttaaaagctggagcggctgttgatgtggccgacggaaacggaatgaccgcttcaatgtgggcagcttcggttggagatactgaaagtgctcgattacttttaagctaccatgcagattacaagctgcgtaattcagctggaaaaacggctcttcagatagcgatggcggaaggaatggaagctgttgtgggcattttgcaagaacaacaattggataatccaacgctcttagaggtgacttagagaaagtgaaagcaacactgatgacggtagatgacatcgacgagcgggacgagaatgggtgcacagcgctgatgttagcggctagaagtaactcggctgaggtgttgcgcgctattctggagcaaaaggctaatgtggatgtacaggatcctacgggatggactgccttgcattacgcaatacttggctacggttccgaatcaaccacgatgcggaaggttgcagtgctgttggagtgtggagctactgttgatccgagaaatcaaaagatggaaacgcccttgctgctagctgcgcaatatggatactcagaaatagctcgatacttactcgatcacaacgcaaaccttcacgttgtggatggagcggggtggactccgttgacaagagcagcatttcacgccaacactgaggttgttttacttctcttagatcgcggctcagacataaatggaagagggaccaccggagaaacggcactcaaatgtgcagtgaaaatatattccgagggggaaaagaaaaaagaaatggcacggttgttactggatcgaggagctctcattgatgcaaaagatacttatggcagtacggcgctccgtgcgactgtagaccgcggaaactatagtgtcgtcgccttattgctagcacgtggggcagctgtagacgaaccggacaattaccactgcacacctagctacactgaaaggacatcagaagatggttgagcgtctgctcatagcaaaagctaacgcgaatgccgaagagaatgcgaagcaaacgtcgcttattgccgcagctcgagcgaatcgctgtgatatcatgctgctgcttctcaattcggtttatcgctaatgccctgggacctgtcggcaccgttggccaccgttagtcaccgttcgccaccacttgccaccgtttacgtttcggcaaacagtattttccgtgctggtagtcttacgatttagatcaaacgagaacagcggaggtctgcttgcgaaggattttttagtacagctatccaccttcgggtccgacatttgctttaacttcccctcgatcgttgagtaggatctccggcgcaaacgaaaagccacatttgtgttaaactctactaccatgttgaaaagtatcgtcgtgacaaggacacacgatttccacacagccccttctcgatcctgctcaaaccggacttgacgcagcagctcgtactcttcgagcgaaaaatcagaggatggctcgtacgaagtctcagtcagctgcatcgactcaaaaaacgctttcgtgcgaaggggggttgactgggcaacttttgcgcagttgaaaaatagttcctttattgttttcttgtggcgtcgagaagcggtaagtgtagcatcaatgccagcattgcttacacgcgcattttcaaaaattcgtctccattggtcgagatcaaagtctatgcgtgaggctgagcggtattgcggagaaatctggggttgggatagcatcgttagcgcaaactccaattgtgccgactctggcaacgcgcctcgacttagcaatgcagcttgagctagttgtatgaagtccagttcccctaaatttgcattacgaccaaactttgtcccaacgcggagattgtggcgaacaataaaaatgtgaagaattcgcaaaccaacgggagctgacacagtgcggacgagtagttttttcaagacgaagtgaaatccttcgagttgactggtggatacgactctcaccgtcttagcagcctcctcgtacgtgttattagagacaaagagatctccgcgccgaatctgcttcgcgttactttcataacagtgacacgatgtggaaacagatttttgtctgcacccatgtccgaccccatggatacgtggaccattcggtgagcagtgattggtcgcatgtgatggagatccggtagagacgagtgtgacgtgtggattgtggatgtgtggggacccggcactgagtctcgttactgcaacggaagcacaatcaaacgaaagtatcgccgttgcttcagcacctgttgggcaacggaatgcttaatgtaataaagtagcaatttcgagtgtattattggttagttggttgtgaagaacaaaaaagacaagaagcagagacaaagacgaccaacagacacgtcgacgccaccaagactagcaacagcaagcctgcccgcggcaccaagtgcagcagcccaactggtcagcagcgcagaggaggaaccaacgccggcgccgggatgcccaggcctacagtagcaacagacacgccgactggatgaaggtcagcaccggcaccaacaccgcgctcaacacgagttccagtagccgaagccagtacttgtaaggccactaccggcaggagcaccaagtttagcagtaaaattacgtgtagtacgcagacacgtgccgcacctgaatgagcaacacctacgttgagccagggtggccataaatgcgctcgccatcagccgaatccccaaggcctggataagcaagatccaagccgatactgtgaccttcatcactagacggctgacgaaagggaaaattgcatgcagcgagaccggatgaagctgtgagtccgtctccacgaggcaaaagtaccaaacagacgcatgtccacactgcgtgaatacaaaaatacgcgtgtaaagtccgcaaatatgctaaaaaaatgtatagtttactcctgtaaagttaaacccatgcaccaaagtcttctttgatcttcttcttgatcgtctcggctactggctcactacttcgttccttcgtttggcacagtagcaaccacataatgcgaaggcgcaccaagcaaacgtattccgtcgaaatagcttctccaagagactgaaagtaatttggatcgtgtatgatcgagtgcacttgtgctactttgtgtcctagtagaatttttaactggttccagttcgattcgagacggttggtggtagtgttagcagcggaaaaacaagacctcgtgcatggtttgcccacatttcacgacatgactcccagttcctatcaaagtaggcgggaatttttgggcactctctcttgcagaagtttgcaaacgcatcgtacgccgtcgcatacagcgatttggtgggactagttaccgcaaaacataacacaggtctgtcagtattttcaaaatatatgatgtttgtccgcatgcttcgtacctgaacatcactcttctgaaaagctttatgatttcatctctttggccaactttgacgttgtattttcgtttttgcaggagcttcttccaataggtgatagcatggaactggcacaaaataactttcgccgacggaaagcacatctccaaagatttccactccgtgaaatctttatctataacgaacgtccttatcttctcccacgaaggattcttctacatgaaaaaatccagaacacgaatcatggttcgttttttctcgttcagcgccagaaagtcaacaacagggatcccgcgaccgctcggacatgtgactagaagtgaccctacgtgcacattaaactatgagtactgtacaaaatatcatcccagtgcaaattacttacccagatgatacccgagattattcgtgccatgagtccggtccatcagaaggcagtcgccccactcttgaaaacacttcttttgagcagcgctctgcattattatcccacaaatgatgccgtgttgatcttgcagtactgttgcatcgtttccttctgtcttcacaaactcttgtaacatgcgtcgagcacgagactccgcgctattttccccttcaattttccgtataatgtttctggattgctgaggtgttatgtttttccctgcatacgttaatttgtaagtaaacttgaagcataaaaaaatccaaagattcgacgaacctagcgtttcggagagaaatgctgtaacatgctttgcactagcgcgcacgtccagcattttggcaacgtcatcaacaacatcgggtcgttcttcaacaattgcgctagcagaaaaatatagatctgacactgcgtcgttcgtcgggtggttgtgtgtgaatgtctgtaagaaaataagatacgacacatttatcagtacctctaatgtaagaaaacaaaacatggcatcgcacctctttgagaatatatattccccaaactccagatacctgctccacggatgctgtgaaccgggcttggcaatctgtgaagcggacattggtgtcgcggacttttttagcacgcgattcctgatagcacccgtgggtgcaccaaaagtcgacgaatttaaaagcgaagcgatcaggaattggagtagctctcttgtttctgtaaaatagccataacataaatccacgattaatttttaaatactgaacacatatcaaataataccaacacatactcgttgtgtttcttggccgacttggagcttcgtctgcgatatttcaaatgaaactgttcttcgtatctcttggcggctgaaaacacttggtcccaagtggtaaatacccgcgggctaaactggggaacaacattatcgattgcggtgaagccagcagcaatgttcgcctttactcgtgatgttttagttcggcgcgaggatggcagccgattttgttgctttgcattgttgggtcctccgggttcttcgagtactcgagtgccgcccatctaccacagcgtaaacattagacatgcaagagcacaggcacttaatgcggacacccactgcgtaccttacgccttacgttccgtttgagctgttaatgggcgccaggccgtcaagcgctaatgaaccccctgcgagcgcagtacccagcataattcttagcacaggaagatcacacgctctttaccaaacttacccagcgtacaacttgtcttcctctttgtagatgaaccccctgcgagcgcagtgcacagcgtaagtcatagcacgggatgatcacacgctctttacctaccttaccagcgcataacttgtcttcgtctccgtagatggtcgcccgcccggtcagtgctggagaaacgcccgcgagcgctaaaagcttgctgccattacgcgcctctattaatagtaagccacaaatggatggagagacagtctacataatataattcttaagaggtttacatcaatactaaaatcaagtatttatattccgttgcgcaacggagcaacatattgattataaaaggtagactgtagaaataaaacaataaatttctttctagcttccgttgcgcaacggtacatacataattttataaagacaaaacatacgagtcatgacgcatcccttccgttgcgcaacggagtgggcgcaatagaagtttcactcccgtcatgtagaccgaactactgctaagaccgatgcgttgtgtctgagtagcaacgtatttgcttagggtgtgtccgcagcatctctgatttcaaacagagggttagtttttcctctggaaagaggtaacccgctgcattgagaattcctctggaagcgtttgcagaacacactgatttaaatacgctatacgccaaaaaccactgtagaacattgcgatgttctacagttttgttgcctcttctgctccgtgcgcacccaccctgctacgtgtgcatggttgaagtaaaatgtatatgacaagttacctgttgcagaagccacacgaccaggatcgcatccgtcgtgcgactgcagagctcggggccaccgggtcacgtttatatgctacctcttagacaccgatatgctcgaggcacagaaggcttttaggctgtagagcggctgcctgcagcagttctgcgcaaatgttcggtctgaccgaccctccatcattttcctcggcatgtcttggcctcctgtagcgttcactattgaggtgcgcacgctacaacgtccaaggaggcccaagtcacagcgggagcggctgccgcaagggcatcgatgaccccttccgtggttggcacgcacgtaagcttgttaacactacagactcaaactccgctggaatcgctacgcagaacacgcagtgttttggccgatccgctgtttatgaaatatcattgttggcaggtgtagactttatccacttgagccttgagggcttgattggtggccacgcggggatggttttctgacacgattgatagttcgcttctttctcctatcgatttcttctcgatcgcgcgggggaatttccttcagtaacatcccgtatccagctatccgagccgatcgggatcgatccttctacaggctgcgctcccttgtccgagacagtaaactggactccatagaaactgaaggagtgttacttgactttttttctactcgggagatggaactctgaactactctaggtatacagcacggcactatccaaacagagctgcttccatggtttcctcgattaatgagctttttgtgggagtctggcggacgtgatgtgtgatgcggcaaagcgccgatcgaaaaggagtaagcatgatgacaaccgttaccgtacacttactaatcagatgtagtctgcgaagtggggaaaactaccgtagtatttcgaatcgcacctctatggtgtaagtgaggcaggttccacaaaccatatctggatacacaatgccttaagttacatatatttttcatggtacccttggttgttccaagtgataacaagtattcaaggtttacctggcgcacgtcctaacaaattgtcattacgcagacaagccccgccaccgcgtgagtaagtaaggagtcctgccaaaataaccgcctccgccaccgatcatcggagcgcagtgttgatgagaagcatgccgtccgttagtgactcagcgcacatgagacaccgccgcgccgtggatacgctcccgttgatgccttgtggtacgtcaccgcgcttaccaatccaacgcttcattcatttcaaaagtgacatcagtcgtatacgatgtgatggcgaacattgtaccgctcgttgaaaggctggttatagaatgcgtcgcaaccgtcttcgttattagcagtagctgtgatggggaatactagtacggaatgtcatgaaggacacagccactccgattctttctcggactgcataggtgaccgtggtaattgcgcaaaaatgtactatacaaccgcactaacttgtttccataaacatatatgaattctgaagctactacattgtactacgcgcaccctagatactggagtactcgactctgacccgggtccatcggagctggatctcaacgacctgtgttgtgacggcctactgcgagggtgctataatgggcagtattgacatcgtatcccataatttgtatatacgcttgtcgttccatcctcctattaacgcatgtaactcactcttgtgctgtctcaaccaaagcgtagccctattataaggtgacaattacagcttagcgcgaagccctgctgtaatataaaaaattaaaattgaactcacagtgactgttacaatactactaaaattaattattatattcattaaaacgcaattcatttatgttcgttatgtttcgtacacattattgttatattgttccgttgctcaacatatggctcaagcaacggatgaaaatatcgtcgaattgtaattctgttgcaggactgacagtgcccggcacttgcagcaagcatgggctcacaggattggagatgcgcccaccggatgagcgctcatattcggtgcggagtcacgcatcctgtccgtccgccgacttccctaactgcaggataggcccaagacgcgaaagtgtggccagcgaatgcatcctggctactgcctgcattggctcagtcatgttgtcggaccaccccactgaatcgccccaccagacatgatcacacgcgcacaagaccctgttggatgaaacctcgtgttgtccggaccggatcgtggtgcacccggtgatagcgtaccgattggagaagtgccacaccgaatggggacggaccggatcgttcattcggtccggcccccgtgcccacactggatatcgacgcaccaagaacaagtccagtgcgcgccgcgtgtgttcgcacagcggcgtcgaaccagacccgatgagaccaagatcacccaagatccacgggcggcaccgaataagccgcagatccaagggagaggtccagtcccaagatgatgagacggtgtgcccaggtacctctgtcatcatctgatgagtgcacccgaagaagtgtcgccgtcaacaagtctccgcataccgaaaccaaaacaagtgtactgaagaactgccaagaagcacaagcatactcaagacaagcgaagcatagtgaaacctacattaaagtcagcgaagtgaaaccaatttgccgaagagcacgcggacgactctgtgctcggggcagaagtagcaccccgactttgacgtcttcaagagccctccaggagactgcctgcgcgcggtctaatccagtttagggacgcttccaaggcctcactggtgtagcgagcactggtgtagtggggactcaaaggtaccaaggcaaagtcggcagtgactggggttttgcgccccggagtgacctgggagagctttattttctatttacgtgctctaaccgggcatccatttcatattccctactgtgtgtctttaatggttgagagatagtcaccccccagaccgaattgattgactactgtgtgataggattgacttatattttgtattgttccctcactctgtgagggtggtgcgcgtaagtgagtgtgcagccagggttgaccagtgccttgggtgacggctcgtgagttgactggcgtatagaccccccacccaagggtcttaaagaataagtggtggctgtatattttgtgacgtttagctcggcattgtatttctgtgtgttggttattctgaattacggatctgactgtggtccctttcattcagtctgaccttctgttcattcggtgtggttcatcccaggaacacacccagcagactttattctgtatcgcaacaactcaactcggtgaaatccggtccgccaaaggtaaacgatacctataggggttgacacaaggacacacgccaaacaccggaccgcattggtgcgattcggtgcgtccaagcggttccaggcccgggtcattcagtgtctcgtgggctgtttatcgcgtggacaatctctggtacccgaacccgaattcattcggtccggcatagtgcgctatacaccctggacgataaaggcgttcacccgcctcgcctcaacagccgcgccactccgcatccgagcagttcacgtccgtcaatgcaacacttctgacagcacgtaaaaatcctttctccatttcgtcaacgggtcgcagcttgcgatctactgtgtacagcgcattacttagctccttagataaccactttcacttagttgacttaaccttctcggttatgcgctgtattacatggaacgggtcttgcttggtcgagacacgatcaccaaacactctgctaaccagattgcgaactccagtgacatcatcacttactaccaaaagctcagcatcgtcagtaaacggtgcaagcatgggctccacatgttttagtagcttctcagtttcatcattgttctctgagcgtgtaaggcaacgaccaacgatctgcccaatttcattttgagcgagaagaagcatcttacagtttgccataccatcacgtttcccactgcctgtccaaatcttaagacgcttacaaaatttcacggagtgatcaatgcggagcgctcttcgaatcttcaagtgcttcatgagattttcacacagagaactgtaaatcgttgtaaattccgtccaaaatgctgtgggcattgtcggaggcatactgagagcaagttggcggggtcggagatatatagtcagcattagagtcgccgaactctatccgcaaaaagagtgtagagcttgtaataccggctttggcagcggcgctccacagtagccaatgtacgcgacagcccattcggcgacataatcccatcatgaaccgtttccataaactcgttagaaagccctcctttcaccgacaaaacaaaagggaagtgaaccagaaactcctcgtgtttctgcacatatgctcgtgatattgtagtaaaacaagttcctgtagaaccagcgcattcgtaccgcacgtaaagcaagtcgcacttcgcgtcaacaagatcgaccgtacggtgtacgtactcctttacagtaacaaccaggagaagcgcactcagcgttgcccccattcaagcactcagggacccacacaacaatcggccgggaaaacaactttgagagaggggccgtgtcgtctttccagctcgttagctccgggtacagtacacttggcgggaaagcatgctgcgacttcgcttcttgcactcgccgtctgcactcttcagcgtccattgcgagttgtgccgggttgtgttcactccccactctattcacttcagcgacttttggctaacttaagatattttagtcgggcggagtcggagatcggagctgcaaccaatcggatcggagatgccggggcctagcggccccggcatcttcgataaaccaccttgattctggcgccaaggtcgattcgtccgacgttgcaggaatgactgcccttatgcatgctgctaacgatggccacgtcggtgtaatgcaacttctacttgaccggagcgccagcaaggacctgaaatccaaggccggccaaacggcgttagactacgcgaaagccaaagacaacagtgaagtcatcgctcttctagaaaagtaaagtaaaaatgatcgagtttttcattttaatggaaaaactcgatcatttttaaaaaaacaactaatgatgtgaaagcgcatacactattttcttagtctcccagcccaaaacacatcgattcaagtcaatgatggtgttcttgtgctaagttacacaaaacctattgacagtctcctctcgtggataaattgatcatgtggacactctccatcattagactgccactctcattcgtcaacgtgaggacgcatgggcaaccggttgtcgctgctccaagcggctgaacgaggcaaaatcgacgaagccaagctcgctctagaacgcggagaactcgtagacaccaaggacggaaatgggtggacgcccttactattcgcagcacgtgaaggccacgagggaaaagtgcgtcttcttctccactacgatgccactccagatctaccaggtataaccgggtggaccccattgatgtgggcaacatttgcaggtcaagaagctgtattcaaggtcttattagaccggaaagcgaatgtggacgcccagaactctgctggagtgacggctttgggtcttgcagctcaaaaaggagacgcaaaaattgcacgcttgttgattgatcaaggcgcctccgtgaatttagcagacagcgacggctggaccccgcttctgctcgctttaagggctgggcacagcgaaatggttcgtcttctccttgatagtaaggcagacgttgaagcacgcaccaaacaaggcaaaacagcactacaaattgcccaagcgcaaggcaatggaggattgtggcgatgattcaaacgcagttgactgaacgaaagaagaaataagtgtctttgctcgatgcagtgctgaaaggcgacgcaagtggggtggaaattgcactggaaagtggcgatagccttgagaagagggacgctgatgacagcacaatgatacatactgctgtggaaaaaggacacgaagcagatattaacgctaaaaacaaggcaggccaaactcctttatccatagctgcaacttcaggcagactcggagttgtgagtattttacttgaagctgaagctcctgttgacgtcgcagatgaggaaaatgaccccgctgtggcacgctgtgaactcgagccacacagaagtcgtgcgtatgcttcttaaccacaaggccttccccgatatccacagcggatcccgtcctacgcctttgtgcgttgcatcggctcgtggtaaggttgatatcgtgcgtcttctgccagagggagccaagactgaagtcgcgaaccgaaaacaattaggatctctgctgtacgctgcagccgctggtcatggagatgtcgtgtgtgaactgcttaagcacaaggcaaacgtagacatgcgcaacactcgagggcagactgcgctctcctcgcggcatctcgcggcctcctggacgttgcgaagattttgctggaagctggcgccaaaattgatctgccggatgccgaacagagaacccctttgtggcatgcatgtactagcggacaagccgataccgttcactttcttctcgagcacaaggcaaaccccgacgtttacagcgtggaaggactaacgccactcacccagtccgtcctatttgacaagatggagattgtccagatactattaagcaacggtactgctatagatttacccgatcgacaaggggccacagcgctgatacatgctgtttgcagtggtcatgtagagctagcgcagcagctcttagaacatggcgcggatgtcgacaaatgcgacttagatggaatgacagcattgcactatgccgagaagaagggagatccagcaattgtcgcgcttatcacggactacatgcaatcctgtcagctcgagctattccatgctactaaacgcggtgatgtgaagcagattcgtgctgcgttggagaaggtaaataatgtggagattcgtgatgatcgaggaaaaacgccactgctgttggcagcagcagaggggcagttagaagctgtaaagttcctcctagatgcaaaagttcgtgtgaatgcggcaagagaggacggacgaacggcgctgatggttgctacagagcaaagggaacgagaagatggcgcaaaagttgctgaaatgtggagctgaagtgaatgttttcgatttaaacggtgcttctgccgtgttgctggcggctaaaggatggagtaacacgatggtgctgcttctactctccagtggcgggggtattgatgcaacgaatgaagaagggaggacggcgcttatgcagacagttctccaggatgatatcgatgctgctcgactgttgctgcggcaaggagcaggggtagatttttctgacaaggactgttggcagcaatttcacttggacacgacgatatggtgaaattgttactggatcatggagcgaaggtcgatttggcagataatgctggagtgactcctctgatgagagctgcgagacgcaatgaatccattgtgcgactgttttttcaccataatgcgagcgttgacaagcaagacgcgaatggacagacagcgctgatgaatgctgtgaccatgacaagtacgatgtggtcgatgttctgattggtatttggtagatagccggggaatgacggcgatgatgtgggctgcgttccatggtcatgttaatcttgtacggatattgctgagcaaccacgcagatatgaacgtggagaataaagatggccagacagcgttgaaaattgcggaggctgaaggacaccaagaagttgtggattgcttgatggaacacaaacacctgcaagcttctggtgcggcactcttgctagcatcgagacatggcgacttgaacagcgtaaagacagctctttgcaactcaggaaaggttgactttcgggataaggacggcaagactgcgttaatgctggcagtttattccaactctaaggaagaggtagtgcgctatctgctcgaacaaggcgctcaagtcgatgctcaagacgcgagtgggttatcggctcttcaccatgcagtacagcgaaatcgctgtggtatggtctcgctgctacttgatcatggtgcatcagttgacttggccgatgtgtcagggaagtccccattggtttgggctgtgtggggtgatcatgctgaggttgcttgcctgcttgttgaccgtatggcaacacttgatggtgtcgatactgatggaaggactgcgctactgcatgcgtcaatgctaggaaaacctgcaacggcttctctacttcttgattctggggcgaatattgagtttgcgcacccgatcggtggtacagccttgttatatgctgtccggaatggcgagggggcaatagttcgcctgctgctcgatagagaagcaaatattaatgccgcaccttgtatggggcagactgcgttgcgatccgctgcaaatcaaggtaatatagcattgtatctctacttctggagcgcggcgcattggtagaccccgccgatattgctcaacggaccccgttcatggcatcaatcctcgaaggccgtgacgaaatggccctcctgctaccaagggggcagcgggcattgactttaaggataaatacggcagaaccgcgctttcattggcagcagcagctggcttacgcagtgctatggaattcctgcttacgcatgggacttcaatcgatctgcaagataataacggtatgtcggccctcatgtatgctgccgctgagggacacgtcgatctggcacgccttctactggatcgtaatgccgatatggatctgagatcgaatgattcgcggacagcgcaaggctgggctcgccagaacaataaaacggatgtaatcgcactactagaagggcggcatcaagagcgagaggctgccaataggctacttctgagtgcctgtttacagggcgatttggaggaagtacgaagtgctttgaggaaaagtgcgaatatcaactgtgttgacgttaacaagcggactccgcttctgctcgcagttatggagaaccacgaaaaaattgtccaacttctcctgaataacaagccagacgttaatgctcagaatattgtggggcgtacagcactaagtatcactgtgcaagaaggctacggacgtctcgttgagctgttgcttggaagcaatgccgatgccagcttggctgatactacaggctggacccccttactctacgcagtgaaggcaggccacagcaacatagtgcggcaactacttgaaagtggtgccaattgtgaagttccgaacgatgctggacaaactcctttggtcatggctgcacaatacgggaacgcaaatgtggcgcaacttttagtccaatatggtgtctcagtgaatacagcggaccggaaccaaacaacgccgctcatatttgctgcaaagggcgactacgacgaaatgatgcaattacttctgagcaatgaggcagatatcgacgcacaagatttgaacggagagtcggcgcttttccattctgtatcatctcaacactcgacagtacttctgctagaccacggtgcatcaattgatttaccgaacaaaacggggatgactccattgatgagagcagccgagctaggtaccaaccaaaccgttcgagtacttcttaagcggaaggctaacattacgacgagtaatgcagacgggtgggcagctttgacgtatgctacagcgaacaaccgatgcgcagtggtgactacgttgctcgagcacggggctcaagccgactgtagagaccaactcgagaacacccctttgatgaatgctgttagaggtggatacgctgacattatttgccttctaagatattcatgctgagaacatgtttggcgagacggcgttacggcaagctgtggataaaaggcgattctactactgcctctcttcttctggagcgaggagcggcggtggatctagtcgataaaaccaagacaagtccgttgatgcaagccatgatgcgagggaatgaagaaatggtgcagattctactggaatggtatgcagacaccaacatcgtaaacgatattggcgagagtccactgatggttgcagctcgcagtgatttaggtggcatcatgaagttgctgatcgaacacggcgcgggtattgacgtgcaggacgattctggcaagaccgcgctcatgcacgccgctattgctggtcatgttaacactgtgcatgttcttctcgacgaaattgcggatatgagtttacaatcaaatgagggacttacggctttagattatgccaagcaacagaagaattctgctatcgcggtcctacttgaaactactcaccatgggcgtgaggagattgaatcttccttgctgaagtatgtggctgaaggggatgtcaagatggtggaggctgctgtgaaacttgatgcgaatattgaggttagagatggcgatggcaacacgccgcttctggttgctgtcacccacaaccatgaggaagttctgaagctcctgctggagagcattgcagacgtcaatgcgcagaatgcagtaggaaggacggctctgagtatcgcatccgagaaaaaccaatcggcgactgcctggactctacgcaaatgtcgacttggccgattcgagcggatgcacggcgctgatgtacgcatctgaagccggtaacgaagggatcgtgaagctattgcttggtgctagagcgaatatcaattctacgaacgatgaaggcaagtccgtatcgatcaaagcggtgcaaaactgccacgaaaaggtggtcgagctgctcctagctcacggaaaggatggaaacgaactcgacgaaaaactcgatcacagtgactgcgacccaggcactgacgaagacagtgagctcaaccttgacgcaccaacgatcgctggtcggacagctttaatcatcgcagcacagttgggtcacgcagacatagctgagctcctgttagatgaaggtgcttcgatcgatctcacagacgctaaaggctggcctcctctcttccacgctgctgatcagggccacgaacacgtcgtggccctcctgttagaatacaaagctgacacgagtctgcaggataaagcaggccaaaccgtgctcaacgttgccgagaaaagcggtcaaaaccgtatcctcgccctcctccgcgcttaccaacgtgggcgaagggagaacgcagcagccttcctggacgcagcgtcaaaaggccgagtagacgacgtccgaacggtcttggcaaaggattaccgcagcgaagtccgcgacaggaacggatgcactgcactgctgctgctagctgcacgcgccgggcacgaagacgtggtgcgcttcctgctcaacgccgaggcacaagtcgattcgcagagtaaattgtccgtcacttccctacttgaagcagcctacaaaggccacgcggaagtcgttcggctcctgattttccacggtgctgatctggataaacccgacgatgacaacgccacggcgttgatcttggcggctcaagcgggtcacgaagctgtggctcgccttctcttgcagcgtggggccaacatcaacgctcaagcgactggaggtgagacggcgctgcacaaagcagcacagaacgggtatctggacatcgtctctcttctgctggcgtacggtgcgccagttgatacgggggatgaagagcagtggacaccacttcggtatgctgcaagagaaggccactccgacgtcgcgcggctgctgctagaagggggcgcgaatgcgaatgcacgaaccaggaccagggagacggcgttctgcaaagctgcgtttgaaggtcacctcgacgttgtcagcgtgctgatcgaacataatgcactgctttttgccacacaaagcggtcacaacgtggtcgtccagctcctcctggaaaacaatgccagctttgaagaatagagaacaggctgttaagtaaaccctcaaaagaagcgcgaattcaggtgttcatttgatcagcaaatgttcagcagagcttcagcacggaggtgttgttgttgatatggataacggggaaatgagcgacggtcgatacgtgcgtaccggtggatgcaacctcttagtccttggccacttggatgggggagtgctggagcaggtagctgccatccgtcgggtcgtcgctcttgggcgtcatgagcgacacgattacagtcacgacgggagggatgatgagcgtcacgatgaaggtgatcatgctgttctgcgagtagagcccctcgggcaggatgaaccagttgaagccacccacgaacttgccctgcgcgatcacgccactgatgaagatggtgatcaaacctgcggcactgccagccagagcgcccgtacgagtcgcgcgcttccacacaccgagcagcatggggccaaccgcagccgtgcacaacaagtcggcgatcaaaaagaggttcaggatgtcgtactgctggtatccgatgacgatggccggcacattcagcagagctgcaaaggtaagcataatgtcaagttagagacgcactatacctcaaagtatcacctcacaacgccacctaccgacgatgatacgcgcgtgcaacaacgacagtttggggaagcacgtcgtcaattctgccgcaattccgatctggatcgagtccgacacaccgctcgccagcatagcgatgacgatgacgatcagcacctcccagccacgtcccatgtccatcaagatggcgaagaacaagactccatccgggtacgccagatacgacaccattccggccagcgccagcgccaccgtgaacgggatgatgatgccgcacgccatgaacgccgccttcctgagcgtgtggtcgtcgtacgccgcgtaaacgcgctgccagaagcctgtgaagaacaaattggacgccgtcacggcgatcacgagcgtcaccagcgtctcgaagccttccaccgtgaaggccgcaacattggtcctggaccacgcgccctcggggatggccacatggaagcacatggcgatgcacaccaccgccaatagagcgataacgccaatgccctgccacacatccgtggccaaactggcgcggagaccaccgatgataaggtacaagttggtgaggaacaccacgaccaggatggggatcagcgagtgcgcatttggtgagaacatggtcgtcaattgggccacgcaggtcagttccgaggccagtgagatgaactggtagaagaccgagatgagcccgatgtagacctgcatgacgtagccgaaacgttgcgccacgacgtccgtcatggtgacgttttcacccagagcggagcgggtgtagggccccacaactgccagtaccagcatgccacacactcccgagagtgtgtaaccgatgacaccccacgaaccagcgtccacgccgatctgagggaaggagaaaagggtccacgagcccattccagctgagaagaagcaccaggcgagacgtagggaggtggtggagttcttggcgctggtattgacagagatgaagctggttagagattattgacataaaaatattgtttcgcttttgcttttgtttgtgacgcacctgatgaagttcttgaccgagttgacctccatccggcggctgacgatgatggcgtaggcggccacggccaccaaagtggcgatcatgacgccgtacgtgactccactggcaagcatgtctgcataaagggggggggatcttattgtcagaatccatccgtttttgccacggataaggtagtgttaacaccatacttgagctgggtctggcagttagagagtcgcgacggcaacaacacgcaaggcaaagacacacgcgtcaacaacgaacagagcagcagtccctccgccggaatgacccggatcaggttttaagggtttggatctcagccggccagcgcacggaactcgtccatggctggcagtcggcacccctcgctgattggatgtcagtgcaacatacacacagaggcaacggatagagaggcacggagacacacaagaggtgctaaatacccgagaatctcgcgttgagggaatccgcgaatgggaagtggggagccagtcaagatagggataatggagattgtacccatcagcagcatctgcccatcacccagtcggtattgtgattgggcgaaaaggcgatgaaaaagatacgattggtcaggaggatttacttaaaaggtgatgatcattgatcctgagtcttgattttaccgttaaatgggtacaacttttgtgcttgtactgtagggcatgcatcttgtgtactaagtagttagcttttcaaggttattcaatgcctagctggcagctccaacgcgcatcatcagcggattcttcatggtcaaggtgagatccagaatggggcggacatcctcggcactgacccaaaggcgccccgcatttcaaatttttcaaatttcggaaagattagaactaaattatactttcgaacttctggcaaccaagagtcagtgccacacaaccagaatcaccccgcatccagcacggcaccatggccccccgcacttcccgcaccacgtacaccgcccgcccgggtcgcagccccctcgccacacccagcccccacgagtatgatgtttcctccaacgcgctcttcaccttcaactctgtgatgagcgcgtgcgtgacggagaagggcgcgctggagtgggcgcagcgagtggggcttctggcaagcgcgcctctgtgtcctacctgcaccaatggcatgacgttgtacgtcgctgtgaagcggacgcactggcgctgctcccgcaccgggtgccgtctggagagaagcgtgcaggtctcctccttctttgcccggtcatcagctcccctctcgaagctgatcaagctgctgttgttctgggcgttccagcacccagtcacaacggcagcatagcaggcggaggtgtcgccgacaacggcagggccgtggtatgtctatgcgcaggacatctgcaccgccgagatgaagcggacgttgctgaaggtaaaatcgtacattattctgttgctaaatattatttagttagcagtgttgaattgtatttttaacgggttgaacaatgatgttaaactgctagatcggtggggttgggcacgtggtcgagatcgacggaacgtacctgaagaagaagcaaaagtaccgacgtggtactcgccacccagacttctggggcttcggcggaatcgaccgaaccactaaaacgtggttcgctcgtgtcctttataacaaccggacaaagccgactctgtctgctttgattaaagctcacatcaaacctgtataactgcgtatgatttgacaagatatctaactctttatgcatgtttatcagtactttgattgtctccgatatgtttaaggcgtacgtgacccaagtccagagtgggcgcaacaaaggaaagttatacacccttaccaacaacaggcacctgcgtgggatgcggtaccaacacctgtgggtaaaccacacgaaacacttcaaggaccccacgactggcgcccatacgaaccgcatcgagggcgtctgggaggtgaagatcaagcagcacatcaaagctgctcgtggtatgcggaaaacagtggtagctggctacctagacgagtgtgtgtggcgcacgtggtacttcgcggagaaacctgcaaagagtcacattttccaagggctagttactggtattacgaagtactacgacgtctagttaaatcaatacaaactgggatgaaaagttctgaaatttgaaaattttgaaatgcggggcgcctttgggtcagtgacggttcctcgcacagccgaaatctgccaacaacagccgcaatcgcgatcttcatttccagtagcgccaagtttcgtccgatgcagactcgcggtccactactgaagggcgaatacttggacggaagcacttctccggtagttaggtcgttgaatctctgggagttgaacgacgcagcatcggacccccacgcactggtcagacgacccgcagagtagaggtgcaggaacacatcggtacctgccgaaatgaatgtctcgtcctgtaggacagtgtctctttgatagtggtaagggatgctggggccggtcgggtgcaggcgcaaagcctcacgcagtgtggcttccaggtacggcaagtcttggactgcttcgtacgatggaacgtagatgtggatttctccaaattttggcagttttgagcgaatttcagcacgaagcttcctctcgacttgagggtggtggctcaacgagtggaagaaccaggccaaagtgtcggacgtcgtgttcctccttgcctcgaggcttgtgagtacaatgtcacgcacttgggtgggtgtcaccgcctccttcttgctcaagaggatcgccatgatgttcttgtgtgccggactctctacgtctgcttcgtcgggcttggagttcttcatttgctccatagcttccatgatcaagtcgacagagaactcgttcatcacactgatagcctcgcgaagtcgtcgttcgtttccgatgttcaggaatcgctggaatttccaaagccacgtgggcttggtgaagcgctcgcttgagatgcggttggcttcatcaaaggctacctcgaacgggtgctccttgccagaggttaatatctccaagtggcagccgaagccgatctcggcgaaggtgtcgagcgtgaactgccgcatgagtttgtacatgtcgaagggttccttggtctcactcttgtctgctaaaatactttgtagtagcagcgtcttttcttggatgaccggagccatgtactcgcgcagcgctcgtgtggtgatcagattcgaccacgggaacgcccaaagataaataaagtagttgcaagcaagcttactgttagcttaagccagtctccagctcatgataatatgggcatttgccctcaaactttcttttgcggtaaaaaaaaatatacacaggcagacacgacgtcagagagtatataaatccagatattcaacaagcttactcgataaatcaagggggatctacacgcaaaatttgcccgtttattaagatgccacgggctcaaaccttcgaacggtccccttattccatcttggagctccggaatccaggacgaaggagcgaatggaggatttagttaggtcgttcgagcgctggacgggaatatgtgtttacaggtaggcaagatcgcatcacagcactagccgtgaccagtggaaatggcgaatttgatgcgaagtctctcaagaaagatcaaaagaggggtcgtaattattatgtgttgctaatctactgacgcatctgttgcaagcaaatcaacggaaaacctgttgcccgtgtcgggttatctgttgcgggtgtaggggagctaagcaacaggttttccgtgatgaaaatgcgcaacagataacaagtagagtgtagtcggtatatgtgttgtatccatgaatgctaatcgaaatgcaatttgaggctgtggtggcgacagagtagatgcctaaatatttcgctgctcgtgtgcacgtatcagtccgggcaccaagtcgtcacgtcgccgtgaacgaaggccacgctccactcgaaaaccccgtcttcctccgacagtcgaacaccgccaactgtaccaatacgatcttcgcgaaaagtagaagcttggccttccttttgaacgtcaacttgtgtaatgaaagcccactgcaaaggagtgtaaggctctttggtaagaagggcttcaagccgatcgggatcccaaaagttggtagatgccggctcttgttgacgggctccaaccggtgctcgaggtcggcctggagacctccgtgcttggataacttctgttgcaagcttcaaatctagctttttcagcagtttgagggaggcaatcacatgcgagcagacccagccagagtgcatgtaactcttgcaggtgcatcggagtgtatctcgaaccattaagtaagttagtctgatccaatatcagatatgtaccgtatatgatcccaacgaggttttaccattttgagagctcaaaggcttgtcgccatcctccaatgcacggaacgctctgtattttcagttttgagtgctactgagtggcgtcggtagactgactgagggctcatgcaaatcattcgctggtttggttcatttccggactcacccctcaaagacaccgctgtctgctccactgctgccactccgtcaacgccccggtcggtcattttcgtcgtaggagactcgatggcgcagcacggatctgacacgagagatgctggctgggtggcgttaatgcagcaccgctacatcagcagacgtccccccccccaaaggattgtcgggctacaacactaagtgcgcgcgcgtcgattttatctactcattttcactgtgtgtgactcgtgcttgcaggtgcttcgtcgaagccgcaatctgttcaggtgccatcgtaagatattagactcagaaacaataaattcagatggaacatgaatcttacgtcggataaaggccaagtagggcgaagttgaaactctggcatcgctcgtgcgcgctcgacgttgaccgacacctgttgcaatgaaaaaaacttcgtccatatgtcaaagatgggtgcagtcttcctgtactaccttctagcgacgaaacaaagctgtatataatcatcaattagcataatgaacctggtagaaagtaaacgcaatatttaaacgtacgttttcgagcgcgtggtagtgaccgtagacccagccaagttcttcgaacgcacaatggcgttaccactgttgaatacgattcgaacgggaatgccacgttgactgggctccgttatttcacgatgattttctggcaacgtcagtaacaacttggccttagagactgcatccttcggcgaagggcctgtgcaagtgtaatttagcagcacgcgttagtataatgtcacaattcaaagcatgtaatttactcacattcgcagaaatgaccctgagggccgtccgataacgtatccgaaacaagaattaagagtctgggcagagcagagtttaatacgtgaatcgtcggggccttctcaaaggctgtgatcacctcttttatcactttgtggtggctctcaatggcctgctgtgttagcaagactcctggtatcggactgctgtttacgctccaccgctcccatcgcgatgtgaggtaaacatcttctagccactccgcatacgcggtctctccttttaacttccaccaccgcacaacgcacttcgagagattgcgaaattgatttagggagcgcgtttcgcgaagccacttcagctgaggaagtgcgtacttcttgtagaagcttttgccgactagctttgagcgctgctttctggcctgcctcagaagatgttcccaacaggacaaaatgatcacttccggcagcgcacgagctatagcactgcagtgatcgatactgcagcaagctaaattcacgtcaacgtcaagaaacatgcgtccgtatttaatgagcgcaccgaacatttgctcatatgcaaaagtgcactccgaccggacaaacatgtagccagggcctaaatcgctgaacatggtgagttgtctcccattcaacagagatcctaccgcaatccaccaacgtccagttgccacaatggaattcggtatgtgccgtccgtcgacatcgcaagactgcctctctgagaggttgtcgcttttgccacgttacgaaatagcgctcgcgaggtcatgattaagccgagcgaagctttcgtttttccgttgtcgtcaaaattgtgctggaagcgctcgagcacgagcaactcgttcatctttgcgaagtctgaatcgtcggcagagtcgagaactttacgggtttgacacaatcgcgagtgtgcccagatgtcaattgtgttgaagtcgtcaatatcccagccttcctccacattttcttgatagtcgcttttctattctcgatcttacgaacctcaggcaccaaattcaaaaggtcaggatcgcgtcgatatttgtgcaacaacatattgcgtactcgacttgctcccatacctaactccaatagtgagtcaattttagacttgtgaacagctgcaataccatgccgcgtgcgcgagacagaagcatcaccgtgctcacccttctgcaacaactcgtatcgaactaagttcgctccaagtttccgctcaacaattttgagggggctggggcacatagcatgcgagcgacatttgaactcagtcccagtgacatttttggaggtgtaccgagttttgtaggtgtattcaaactcgttgtgctgctgtagtgccacggtcgcctcctgtagcgaatcgtagaaccccaccgacacatacttcgctacggtagcctccaccaactctaaagcaccgcgatctacacccacgttgatctcaacttcgtcgtcgtccccaaaatctagctgctggcaaatcgagtccagttgctcatcctcatcagcgctgtcaccaacgttgtcctccacggagcgtgcgttccccgttgtagctgagctagtgcaaggcacggctgcggaagcgctaccttccatgatgcctcaggctggaaagtgagacctggaaaagacaacagctttgtaaccactggactactgcgcatctaaatatacacacaaaaataaattccgatatgactcgacgtatgaagggcatcacgttgataatgtagtatcagcatatcttggccatagaaatatactacaacgcaaacactccggctgtcattcgactacatggtgtagtgcgatgtgacagataatccaggaggctcattcatagtatctgttgcgcattttcatcacggaaaacctgttgcttagctcccctacacccgcaacagataacccgacacgggcaacaggttttccgttgatttgcttacaacagatgcgtcagtagattagcaacagattataatattctccctcaaaagaggctgatgttcgtctgcgtgaacaactaagttagtgcgcacagcttctgtttgcactttcaatacgaagtggttccgtctctaaagctcccttaagttccgctgatacgtaggtcgcgttcacaatttagctagccgccgggtacccagtgggcccggtccgcggggttgatgcagagctcgccctgagtgcaatcggcgataaccgcataaaaataaaaaataaaaattcacaatttggctactgcaagctcgggatagataggctatctacataagtagtttccttaacatacagtgcattatcttattgatcagtagaaattatccttgttacaggttagtgacttctcgataagcaaaaaccgttctgactacggagctaagagagacgtaatgaatggtgacgtccaagattgagatatccgaagcgctgggtggtgcttgaacagctccctcggcgtttgttaagagagcgcgcctgcgtatagcaaacacccgagggtgggccgcgacaaaacggtgcaggcgtgataaagcggggaattcgtgcagacactcttgaagacgctggcaggtagcataacttattgctgttcagagctacgttgaactcgattgtccatattgctctcgcactcatcttccagaagcgccatcataatttctaactgtttgcggcattttagtttaatttttacccgtgaatcaaaaaccttaggatacgagcacatgtactgctttgaggtggttcgagtagcattaaggaaggaggaagttatgaattgggaggaggacgttatgaattctcatttgttggtaagaaatttgttcgtaaatattgtttcatagtacgttctgctgtataggggtacggaattcaatgctgagtcacaagaagagctcacacaatactcacaatcagttaaggcgtgtgccagtagatattttgccagtgacgacgaaatgaactggctagtttttttgttgttggatggcccgcgttggtttcatgaaagcgcatggggtaactgtcgtccttttgcgtgggctgaggatcaaaactagcaatagctgttaatgatgctgccgccccctggcgcttggcacgtgcaacaaagaatttccagcttcaatttactcgaaaaatttagttcacgggagtcaccaagttctctgcaatgctgctcgtgagaaaaaaagaatggtcaacgtgatttactgttaacttgatgagtcatcaagtcatcaaagatgaccacaagaagtaaatgaatttaataatgagatccctaacaacagtgcagctccgccaattttgaaatgttctgcaaatctgaaaaaaactagacgcgttgtttgcatacgcttggtctgttgagtatccaattgttgcttagcagcggtaattcgctactttagaacagtgttaacaacgctgaatgcccgggaagttgatcgtgtttcaaagataatctccagtctcccacgccgtctaatattatgcgggctagtcgtagctcacttcgagcaacttcaaaatctgtgccaaactcttgtgcatcttaaggtactcattaattgtggctcgtacatcaattcttaacgacatacttgggtattctacagcccgagaatttatttcaacaaatgcggacctctacgaaagtgtgcgatatctttgtatagccttttgtagccaatgagcgccacagtaactccaaacctgtaacgctacataactccgaacccctgctcgtggtttgaaagctggaaggatctgaccacaaaccagcgaaagcggtaattttggttcggaaatctgtgtagtttacgagcaaaccaatttcttgcacgtttcatggtttggtttgttcagtgtgataaaacttgtttgcactctggccgtcgcgttccactgcagctacagctacaagggactcagatagcgctatcgtagcacttttggttccacacaaaggaaatacatcttagtctgaagtatttattttgacgaagttgttgcttactagtgggcgtacgtgtggttttagttatgaataaatgcgtacacaagaaagtaaaactgtcggtgaagcgttcatgcaaaagtataatttcaattttaaaatttaatgctcctgcttacgtgtatgaaagagaaaatgctcgggtcaaacttttggataccggcaggcgaaatcggaagacagcagtgcattcagatgggagtgaggtacgcctctccaccagcaaaaggatatcggttaacctgggacttcagtcacttcgcaagacggacgagcgtcaggtagctcgtgcccgtgaggcggacagggcacttgactgcgacgcgctcatggttgttcacgcggatggtatccgtgaccatggtcgagctctgtccgaggttcgagaagacatgctgaatgcacgctttgccctgcaccaactggatgtgcatgctggcgctgttcatctcgtgggagatgacggcagtgagttggtaaagtcccggggttggcagcatgacgtccgagctcgctcctcacaagatgaactctccctttttggccgttgcctgcttctccaccaccaccgcagcacgttgaaccacttgacctcccccttcagcgtggaaatggctgtgtcacgactggccacggctatcttcagctccgaacctggcgctgcaggtcctgcaacccgatggcgtccttggcatagcactggaggtcttcggtcgcgtctcggaggtcgagtatcttggcttcgagcacgtcaacgcgctccaacaggatggggttcagcgggatcttgtacttaaccacgtgcgactgcttcagcacttggaactttagcgtcacctcgagccagaactctccgtcttgtcggtagagctcggtggggtctctggcttgacgggggtcgccatcttggacttgggtagctcaccgcagagtgacgaatgctaaatatttttttaatgatttagttaaaataaactgttttctcattattgtgcgtggaatcataggtgtggccttgcaaccctgactagttggtcgatgtcaggattcctgtcgcttcggatgttacttgttaaaagtcctcatactcccaccatcatgattgttttttctccacactaacagaagaaatctgacggtttgctcgtacgaactccctgcattttctcgtatggattttcgaacgctttgccgctgagcttcccagcgctccaccacgcgcgctagctgcaagttttttttgtaataacatcttctaattttgcgcaaaatactaatacagcatgatgaacgagacagcacttacgatcccaataagcaaacaattgatttacttagtaagctttagtggccgaatcttaatctaatctgtggacaaaatacgtccaggtacgtacttcgaagtattaaaatactggtgaacgccacagtggcattgtatgaagtatccgttgtttggttgggactatgcactgtactgtagagtttttgtagtttctggcgtacgctctaaataaagtccttttctccacagaaacgaacatgtttttggaggttcaggtcgttgtagttcttcattaaaaaaaacgttaatgaccctgaactcgtccaggttcttcttcagtttaatcgcgttcgacatcaatggagtttcctttgtttgtttaactgcagcatacatcctccgcactttctctctgtgccaccccaccatgcgaggcttgctccaatttcacaaccgtgacctccaaacggagaatttcctttgccgcaatcataaattttgtcagagcttcgtctccgaagcaagccgttaatggcgagatcatcaacgcttcgggcttcttcctgttcgcattaaaagtttggattgccaaccttgaaaattttgaagagctttttctgtttgagagaagtaatttggtcttcgaattcgacgaatacacaagtgccgttgactggaaaattgcaggaatggtcgagttgatggtagctaacacggaaactttcgacgcaaaacggatgaaagccgaaagaaatccccattgcattctatccatgcagtcctcattacgcaatttgcctgctcaagctcgaagttaccaagcatcttaacgacgatgaagcttaccgccgtcgccgtcgctgcagtacttgcaaccgcaggtgtcgttgcagctgaaccatctgcgctccgagttttggttgacaccccaaccacgacaactgggaatggagttgctgagacgaaactggacccagtcgcaggcgagccgaaggaagttggcgacaagaaggaacactggggacgcccgtggggccgtccatggggatgtggtggtggctgtcgtggtcgcggctgcggtggacactgggactgg
